(19) United States
(12) Patent Application Publication
(10) Pub. No.: US 2023/0190915 A1
(43) Pub. Date: Jun. 22, 2023

(54) T CELL EPITOPES AND RELATED COMPOSITIONS USEFUL IN THE PREVENTION, DIAGNOSIS, AND TREATMENT OF COVID-19

(71) Applicant: EPIVAX, INC., Providence, RI (US)

(72) Inventors: Anne De Groot, Providence, RI (US); William Martin, Providence, RI (US)

(21) Appl. No.: 17/795,181

(22) PCT Filed: Feb. 12, 2021
(86) PCT No.: PCT/US2021/017825

§ 371 Date: Jul. 25, 2022

Related U.S. Application Data
(60) Provisional application No. 62/976,715, filed on Feb. 14, 2020.
(60) Provisional application No. 62/983,012, filed on Feb. 28, 2020.
(60) Provisional application No. 62/991,790, filed on Mar. 19, 2020.
(60) Provisional application No. 62/991,814, filed on Mar. 19, 2020.
(60) Provisional application No. 63/001,632, filed on Mar. 30, 2020.
(60) Provisional application No. 63/001,624, filed on Mar. 30, 2020.
(60) Provisional application No. 63/004,729, filed on Apr. 3, 2020.
(60) Provisional application No. 63/006,962, filed on Apr. 8, 2020.
(60) Provisional application No. 63/065,135, filed on Aug. 13, 2020.
(60) Provisional application No. 63/065,161, filed on Aug. 13, 2020.
(60) Provisional application No. 63/065,152, filed on Aug. 13, 2020.
(60) Provisional application No. 63/065,129, filed on Aug. 13, 2020.
(60) Provisional application No. 63/065,163, filed on Aug. 13, 2020.
(60) Provisional application No. 63/073,161, filed on Sep. 1, 2020.
(60) Provisional application No. 63/073,156, filed on Sep. 1, 2020.
(60) Provisional application No. 63/081,062, filed on Sep. 21, 2020.
(60) Provisional application No. 63/081,055, filed on Sep. 21, 2020.
(60) Provisional application No. 63/083,389, filed on Sep. 25, 2020.
(60) Provisional application No. 63/092,229, filed on Oct. 15, 2020.

(51) Int. Cl. A61K 39/215; A61P 31/14; C12N 7/00

(52) U.S. Cl. CPC A61K 39/215; A61P 31/14; C12N 7/00

(57) ABSTRACT

The present disclosure generally relates to novel epitope-based compositions, including vaccines, against severe acute respiratory syndrome coronavirus 2 (SARS-CoV-2) and diseases caused by SARS-CoV-2, including the highly contagious coronavirus disease 2019 (which has been termed and may be referred to herein as “COVID-19”, “2019-nCoV”, or the “2019 novel coronavirus”. The disclosure relates to immunogenic polypeptides and the uses thereof, particularly in vaccine compositions. The disclosure also relates to nucleic acids, vectors, and cells which express the polypeptides and the uses thereof. The polypeptides more specifically comprise an agretope predicted to be a ligand of HLA class I and/or HLA class II MHC molecules, as well as an epitope that is predicted to be recognized by T-cells in the context of MHC class I and/or class II molecules. The compositions are particularly suited to produce vaccines, particularly for vaccinating against SARS-CoV-2 infection and related diseases caused by SARS-CoV-2, including COVID-19.

### CROSS-REFERENCE TO RELATED APPLICATION

[0001] This application depends from and claims priority to U.S. Provisional Application No. 62/976,715 filed Feb. 14, 2020, U.S. Provisional Application No. 62/991,790 filed Mar. 19, 2020, U.S. Provisional Application No. 63/001,632 filed Mar. 30, 2020, U.S. Provisional Application No. 63/065,129 filed Aug. 13, 2020, U.S. Provisional Application No. 63/073,161 filed Sep. 1, 2020, U.S. Provisional Application No. 63/083,389 filed Sep. 25, 2020, U.S. Provisional Application No. 63/092,229 filed Oct. 15, 2020, U.S. Provisional Application No. 62/983,012 filed Feb. 28, 2020, U.S. Provisional Application No. 62/991,814 filed Mar. 19, 2020, U.S. Provisional Application No. 63/065,161 filed Aug. 13, 2020, U.S. Provisional Application No. 63/081,062 filed Sep. 21, 2020, U.S. Provisional Application No. 63/001,624 filed Mar. 30, 2020, U.S. Provisional Application No. 63/065,135 filed Aug. 13, 2020, U.S. Provisional Application No. 63/004,729 filed Apr. 3, 2020, U.S. Provisional Application No. 63/065,152 filed Aug. 13, 2020, U.S. Provisional Application No. 63/006,962 filed Apr. 8, 2020, U.S. Provisional Application No. 63/065,163 filed Aug. 13, 2020, U.S. Provisional Application No. 63/073,156 filed Sep. 1, 2020, and U.S. Provisional Application No. 63/081,055 filed Sep. 21, 2020, the entire contents of each of which are incorporated herein by reference.

### REFERENCE TO SEQUENCE LISTING SUBMITTED ELECTRONICALLY

[0002] The instant application contains a Sequence Listing which has been submitted electronically in ASCII format and is hereby incorporated by reference in its entirety. Said ASCII copy, created Feb. 10, 2021, is named “EPV0035WO Sequence Listing 1_ST25.txt” and is 1905 KB bytes in size.

### FIELD

[0003] The present disclosure generally relates to novel T-cell epitope-based compounds and compositions, including vaccines, effective against severe acute respiratory syndrome coronavirus 2 (SARS-CoV-2) infection (or a closely related virus such as Severe Acute

[0004] Respiratory Syndrome (SARS) or Middle East respiratory syndrome coronavirus (MERS-CoV)) and/or related diseases caused by SARS-CoV-2, including COVID-19 in a subject in need thereof,. Such T-cell epitope compounds and compositions include immunogenic T-cell epitope polypeptides (including concatemeric polypeptides and chimeric or fusion polypeptides), as well as nucleic acids, plasmids, vectors (including expression vectors), and cells which express the polypeptides, pharmaceutical compositions, and vaccines. The present disclosure also generally relates to methods, assays, and kits for detecting a cell-mediated immune response, including a T cell response (e.g., CD8+ and/or CD4+ T cell response), against severe acute respiratory syndrome coronavirus 2 (SARS-CoV-2) or a related coronavirus, as well as methods, assays, and kits for the diagnosis of a SARS-CoV-2 infection or related coronaviruses infection.

### BACKGROUND

[0005] Severe acute respiratory syndrome coronavirus 2 (SARS-CoV-2) is a positive-sense single-stranded ribonucleic (RNA) virus belonging to the Coronaviridae family. SARS-CoV-2 (which may also be referred to herein as “COVID-19 virus”) was first identified in Wuhan, China in late 2019 and is the cause of the highly contagious coronavirus disease 2019 (which has been termed and may be referred to herein as “COVID-19”, “2019 novel coronavirus”, or “2019-nCoV”). SARS-CoV-2 infection causes a broad range of disease, known as coronavirus disease 2019 (COVID-19), from mild or no symptoms to serious complications that may be rapidly fatal, often in adults over 65 years old and individuals with underlying medical conditions including cardiovascular disease, type 2 diabetes, and obesity. The global spread of COVID-19 was declared a pandemic by the World Health Organization (WHO) on Mar. 11, 2020. As of Dec. 25, 2020, the global spread of severe acute respiratory syndrome coronavirus 2 (SARS-CoV-2) has resulted in over 79 million cases of COVID-19, 1.7 million deaths and global economic disruption in less than 10 months since the first case appeared in Wuhan, China. Recovery from natural infection in non-severe disease, and resistance to severe disease in younger individuals suggests that the immune system can be harnessed to help bring an end to the COVID-19 pandemic by vaccination strategies that recapitulate protective immune responses.

[0006] While immune correlates of COVID-19 protection are not yet defined, several studies show cellular adaptive immune mechanisms contribute to SARS-CoV-2 control. Humoral immune responses also contribute to protection and have been the focus of current vaccine development efforts. Virus-specific IgM and IgG antibodies are found in nearly all infections. Seroconversion is observed 7 to 14 days after onset of symptoms and persists for weeks after virus clearance. Antibody levels wane four to five months after infection, but durable memory B cell immunity has been described in mild and severe disease. Antibodies are found against the surface spike glycoprotein and the internal nucleocapsid protein. Neutralizing antibodies target the receptor binding domain of spike, preventing cell entry via the angiotensin-converting enzyme 2 (ACE2) host receptor. Neutralizing antibodies are found in more than 90% of persons who seroconvert. In a prospective study of exposed healthcare workers, anti-COVID-19 IgG titers were correlated with protection from subsequent PCR test positivity, suggesting that either antibodies, or T cell response (responsible for driving higher Ab titers) or both were correlates of protection from subsequent infection. In other studies, spike-specific follicular helper CD4 T cells (Tfh) frequencies correlate with neutralizing antibody responses. Although much of the current COVID-19 vaccine focus has been on generating antibody responses, this latter finding identifies a critical role for T cells in generating immunity.

[0007] More recently, correlations between a wide range of T cell responses and protection from infection have begun to emerge. A large prospective study showed numbers of SARS-CoV-2-specific T cells indirectly correlate with disease risk. Individuals with low T cell responses to spike, membrane and nucleocapsid proteins develop COVID-19 while high responders do not, even if seronegative. T cell breadth is another key feature of the protected response, as patients with mild disease have higher TCR clonality in blood and bronchoalveolar lavage in comparison with severe disease.

[0008] T cell phenotype and function may also help to predict mild versus severe cases. Poor outcomes are associated with multiple signs of T cell impairment including enhanced expression of PD-1 and TIM-3 exhaustion markers, higher inhibitory molecule levels including CTLA-4 and TIGIT, and low frequencies of polyfunctional CD4 and CD8 T cells, as well as low GzmB-producing CD8 T cells. In contrast, non-severe patients present with lower levels of inhibitory molecules and higher GzmA, GzmB, and perforin effectors. Moreover, in recovered patients,

[0009] Tfh are found in the periphery at the time of viral clearance and persist into convalescence in contrast with an absence of lymph node Tfh found in patients who died of COVID-19. These findings underscore the importance of defining T cell epitope specificities to better understand COVID-19 immunity and to develop antibody- and T cell-directed vaccines that exploit T cell immunity.

[0010] There is an urgent need for the identification of CD4+ and CD8+ effector T cell epitopes contained in SARS-CoV-2 and for their use in the development of effective pharmaceuticals and vaccines. There is also an urgent need for methods, assays, and kits for detecting an immune response, including a cell-mediated immune response, such a T cell response (e.g., CD8+ and/or CD4+ T cell response), against the SARS-CoV-2 or related coronaviruses, as well as methods, assays, and kits for the diagnosis of a SARS-CoV-2 infection or related coronaviruses infection.

### SUMMARY

[0011] Accordingly, the present disclosure provides novel, therapeutic T cell epitope compounds and compositions (including one or more of e.g., peptides or polypeptides as disclosed herein, including polypeptides having an amino acid sequence comprising, consisting of, or consisting essentially of one or more of SEQ ID NOS: 4-1676, 1713-2595, 2605-2638, 2647-2718, and 2735-8692 and/or fragments and variants thereof, and optionally 1 to 12 additional amino acids distributed in any ratio on the N terminus and/or C-terminus of the polypeptide of SEQ ID NOS: 4-1676, 1713-2595, 2605-2638, 2647-2718, and 2735-8692 as disclosed herein; concatemeric peptides as disclosed herein, including concatemeric polypeptides comprising, consisting of, or consisting essentially of one or more of SEQ ID NOS: 1677-1692, 2593-2604, 2639-2646, and 2719-2734 and variants and fragments thereof; chimeric or fusion polypeptide compositions as disclosed herein; nucleic acids as disclosed herein, expression cassettes, plasmids, expression vectors, recombinant viruses, or cells as disclosed herein; vaccine compositions or formulations as disclosed herein, and/or pharmaceutical compositions as disclosed herein), and use of the same, e.g., in methods of stimulating, inducing, and/or expanding an immune response , e.g., against coronavirus infection, including SARS-CoV-2 infection and related diseases caused by SARS-CoV-2, including COVID-19, and methods of treating and/or preventing against SARS-CoV-2 infection and related diseases caused by SARS-CoV-2, including COVID-19 in a subject. In aspects, a T-cell epitope compound or composition of the present disclosure includes one or more peptides or polypeptides a disclosed herein. In aspects, the present disclosure is directed to a peptide or polypeptide having an amino acid sequence comprising, consisting of, or consisting essentially of one or more of SEQ ID NOS: 4-1676, 1713-2595, 2605-2638, 2647-2718, and 2735-8692, or fragments or variants thereof. The phrase “consisting essentially of” is intended to mean that a peptide or polypeptide according to the present disclosure, in addition to the sequence according to any of SEQ ID NOS: 4-1676, 1713-2595, 2605-2638, 2647-2718, and 2735-8692 or a fragment or variant thereof, contains additional amino acids or residues that may be present at either terminus of the peptide and/or on a side chain that are not necessarily forming part of the peptide or polypeptide that functions as an MHC ligand and provided they do not substantially impair the activity of the peptide to function as a T-cell epitope. The polypeptides of the present disclosure may be isolated, synthetic, and/or recombinant, and may comprise post-transcriptional modifications such as glycosylation, added chemical groups, etc. In aspects, the peptides or polypeptides can be either in neutral (uncharged) or salt forms, and may be either free of or include modifications such as glycosylation, side chain oxidation, or phosphorylation. In aspects, the peptides or polypeptides of the instant disclosure can be capped with an n-terminal acetyl and/or c-terminal amino group. In aspects, peptides or polypeptides of the instant disclosure having SEQ ID NOS: 1055, 1058-1060, 1062, 1065-1066, 1069-1072, 1075, 1078, 1081-1087, 1089, 1091-1094, 1100, 1106, 1110-1113, 1115 and 1366, 1369-1371, 1373, 1376-1377, 1379-1383, 1385-1386, 1389, 1391-1400, 1402-1404, 1407, 1411-1419, 1421-1424, 1426-1427, 1118-1365, and 1429-1676 are capped with an n-terminal acetyl and a c-terminal amino group. In aspects, peptides or polypeptides of the instant disclosure having SEQ ID NOS: 1068, 1074, 1080, 1088, 1096, 1101-1105, 1107-1108, and 1116 are capped with an n-terminal acetyl and are not capped at the c-terminus.

[0012] In aspects, the instant disclosure is directed to a peptide or polypeptide comprising, consisting, or consisting essentially of an amino acid sequence of SEQ ID NOS: 4-1676, 1713-2595, 2605-2638, 2647-2718, and 2735-8692 (and/or fragments or variants thereof), and optionally 1 to 12 additional amino acids distributed in any ratio on the N terminus and/or C-terminus of the polypeptide of SEQ ID NOS: 4-1676, 1713-2595, 2605-2638, 2647-2718, and 2735-8692. In aspects, the instant disclosure is directed to a peptide or polypeptide have a core amino acid sequence comprising, consisting of, or consisting essentially of one or more peptides or polypeptides having an amino acid sequence of SEQ ID NOS: 4-1676, 1713-2595, 2605-2638, 2647-2718, and 2735-8692 (and/or fragments and variants thereof), and optionally having extensions of 1 to 12 amino acids on the C-terminal and/or the N-terminal of the core amino acid sequence, wherein the overall number of these flanking amino acids is 1 to 12, 1 to 3, 2 to 4, 3 to 6, 1 to 10, 1 to 8, 1 to 6, 2 to 12, 2 to 10, 2 to 8, 2 to 6, 3 to 12, 3 to 10, 3 to 8, 3 to 6, 4 to 12, 4 to 10, 4 to 8, 4 to 6, 5 to 12, 5 to 10, 5 to 8, 5 to 6, 6 to 12, 6 to 10, 6 to 8, 7 to 12, 7 to 10, 7 to 8, 8 to 12, 8 to 10, 9 to 12, 9 to 10, or 10 to 12, wherein the flanking amino acids can be distributed in any ratio to the C-terminus and the N-terminus (for example, all flanking amino acids can be added to one terminus, or the amino acids can be added equally to both termini or in any other ratio). In aspects, the instant disclosure is directed to a peptide or polypeptide have a core sequence comprising, consisting of, or consisting essentially of one or more peptides or polypeptides having an amino acid sequence of SEQ ID NOS: 4-1676, 1713-2595, 2605-2638, 2647-2718, and 2735-8692 (and/or fragments and variants thereof), optionally with extensions of 1 to 12 amino acids on the C-terminal and/or the N-terminal, wherein the overall number of these flanking amino acids is 1 to 12, 1 to 3, 2 to 4, 3 to 6, 1 to 10, 1 to 8, 1 to 6, 2 to 12, 2 to 10, 2 to 8, 2 to 6, 3 to 12, 3 to 10, 3 to 8, 3 to 6, 4 to 12, 4 to 10, 4 to 8, 4 to 6, 5 to 12, 5 to 10, 5 to 8, 5 to 6, 6 to 12, 6 to 10, 6 to 8, 7 to 12, 7 to 10, 7 to 8, 8 to 12, 8 to 10, 9 to 12, 9 to 10, or 10 to 12, wherein the flanking amino acids can be distributed in any ratio to the C-terminus and the N-terminus (for example all flanking amino acids can be added to one terminus, or the amino acids can be added equally to both termini or in any other ratio), provided that the polypeptide with the flanking amino acids is still able to bind to a same HLA molecule (i.e., retain MHC binding propensity) as said polypeptide core sequence without said flanking amino acids. In aspects, said polypeptide with the flanking amino acids is still able to bind to a same HLA molecule (i.e., retain MHC binding propensity) and/or retain the same TCR specificity as said polypeptide core sequence without said flanking amino acids. In aspects, said polypeptide with the flanking amino acids is still able to bind to a same HLA molecule (i.e., retain MHC binding propensity) and/or retain the same TCR specificity, and/or retain anti-viral activity, including anti-SARS-CoV-2 activity, as said polypeptide core sequence without said flanking amino acids. In aspects, said flanking amino acid sequences are those that also flank the peptides or polypeptides included therein in the naturally occurring protein from which the peptide or polypeptide is found. For example, for a peptide or polypeptide have a core sequence comprising, consisting of, or consisting essentially of one or more peptides or polypeptides having an amino acid sequence of SEQ ID NOS: 4-68, 1003-1005, 708-739, 1055-1059, or 1366-1370 (and/or fragments and variants thereof), optionally with extensions of 1 to 12 amino acids on the C-terminal and/or the N-terminal, the extensions of 1 to 12 amino acids are those found flanking the amino acid sequence of SEQ ID NOS: 4-68, 1003-1005, 708-739, 1055-1059, or 1366-1370 in the amino acid sequence of the envelope (SEQ ID NO: 1) of SARS-CoV-2. For a peptide or polypeptide have a core sequence comprising, consisting of, or consisting essentially of one or more peptides or polypeptides having an amino acid sequence of SEQ ID NOS: 69-213, 1006-1015, 740-851, 1060-1072, 1118-1119, 1371-1383, or 1429-1430 (and/or fragments and variants thereof), optionally with extensions of 1 to 12 amino acids on the C-terminal and/or the N-terminal, the extensions of 1 to 12 amino acids are those found flanking the amino acid sequence of SEQ ID NOS: 69-213, 1006-1015, 740-851, 1060-1072, 1118-1119, 1371-1383, or 1429-1430 in the amino acid sequence of the membrane (SEQ ID NO: 2) of SARS-CoV-2. For a peptide or polypeptide have a core sequence comprising, consisting of, or consisting essentially of one or more peptides or polypeptides having an amino acid sequence of SEQ ID NOS: 210-707, 1016-1054, 852-1002, 1073-1117, 1120-1123, 1384-1428, 1431-1434, 1782-1800, 1975-1984, 2568, 2569, 2590, 2647-2676, or 2701-2704 (and/or fragments and variants thereof), optionally with extensions of 1 to 12 amino acids on the C-terminal and/or the N-terminal, the extensions of 1 to 12 amino acids are those found flanking the amino acid sequence of SEQ ID NOS: 210-707, 1016-1054, 852-1002, 1073-1117, 1120-1123, 1384-1428, 1431-1434, 1782-1800, 1975-1984, 2568, 2569, 2590, 2647-2676, or 2701-2704 in the amino acid sequence of the spike (SEQ ID NO: 3) of SARS-CoV-2. Additional examples are found in the specification, below. In aspects, said flanking amino acid sequences as described herein may serve as a WIC stabilizing region. In aspects, the use of a longer peptide may allow endogenous processing by patient cells and may lead to more effective antigen presentation and induction of T cell responses. In aspects, the extension(s) may serve to improve the biochemical properties of the peptides or polypeptides (e.g., but not limited to, solubility or stability) or to improve the likelihood for efficient proteasomal processing of the peptide. In aspects, the polypeptides of the present disclosure may be islated, synthetic, and/or recombinant, and may comprise post-transcriptional modifications such as glycosylation, added chemical groups, etc. In aspects, the peptides or polypeptides can be either in neutral (uncharged) or salt forms, and may be either free of or include modifications such as glycosylation, side chain oxidation, or phosphorylation. In certain aspects, the peptides or polypeptides of the instant disclosure can be capped with an n-terminal acetyl and/or c-terminal amino group.

[0013] In aspects, the present disclosure is directed to a concatemeric polypeptide or peptide that comprises at one or more of the instantly-disclosed polypeptides or peptides (e.g., but not limited to, a peptide or polypeptide comprising, consisting, or consisting essentially of an amino acid sequence of SEQ ID NOS: 4-1676, 1713-2595, 2605-2638, 2647-2718, and 2735-8692 (and/or fragments or variants thereof), and optionally 1 to 12 additional amino acids distributed in any ratio on the N terminus and/or C-terminus of the polypeptide of SEQ ID NOS: 4-1676, 1713-2595, 2605-2638, 2647-2718, and 2735-8692) linked, fused, or joined together (e.g., fused in-frame, chemically-linked, or otherwise bound) to an additional peptide or polypeptide. Such additional peptide or polypeptide may be one or more of the instantly instantly-disclosed polypeptides or peptides, or may be an additional peptide or polypeptide of interest. In aspects a concatemeric peptide is composed of 3 or more, 4 or more, 5 or more 6 or more 7 or more, 8 or more, 9 or more of the instantly-disclosed peptides or polypeptides. In other aspects, the concatemeric peptides or polypeptides include 1000 or more, 1000 or less, 900 or less, 500 or less, 100 or less, 75 or less, 50 or less, 40 or less, 30 or less, 20 or less or 100 or less peptide epitopes. In yet other embodiments, a concatemeric peptide has 3-100, 5-100, 10-100, 15-100, 20-100, 25-100, 30-100, 35-100, 40-100, 45-100, 50-100, 55-100, 60-100, 65-100, 70-100, 75-100, 80-100, 90-100, 5-50, 10-50, 15-50, 20-50, 25-50, 30-50, 35-50, 40-50, 45-50, 100-150, 100-200, 100-300, 100-400, 100-500, 50-500, 50-800, 50-1,000, or 100-1,000 of the instantly-disclosed peptides or polypeptides linked, fused, or joined together. Each peptide or polypeptide of the concatemeric polypeptide may optionally have one or more linkers, which may optionally be cleavage sensitive sites, adjacent to their N and/or C terminal end. In such a concatemeric peptide, two or more of the peptide epitopes may have a cleavage sensitive site between them. Alternatively two or more of the peptide epitopes may be connected directly to one another or through a linker that is not a cleavage sensitive site. In aspects, a concatemeric polypeptide of the present disclosure comprises, consists of, or consists essentially of one or more of SEQ ID NOS: 1677-1692, 2593-2604, 2639-2646, and 2719-2734 and/or fragments and variants thereof. In aspects, the instantly-disclosed concatermeric polypepide or peptide sequences do not correspond to a naturally occurring sequence, i.e., each of the one or more of the instantly-disclosed polypeptides or peptides (e.g., but not limited to, a peptide or polypeptide comprising, consisting, or consisting essentially of an amino acid sequence of SEQ ID NOS: 4-1676, 1713-2595, 2605-2638, 2647-2718, and 2735-8692 (and/or fragments or variants thereof), and optionally 1 to 12 additional amino acids distributed in any ratio on the N terminus and/or C-terminus of the polypeptide of SEQ ID NOS: 4-1676, 1713-2595, 2605-2638, 2647-2718, and 2735-8692) are linked, fused, or joined together (e.g., fused in-frame, chemically-linked, or otherwise bound) to an additional peptide or polypeptide (which may be one or more of the instantly-disclosed peptides) in such a fashion such that the overall concatermic polypeptide does not correspond to a naturally occurring coronavirus sequence. In aspects, the concatemeric polypeptides of the present disclosure may be isolated, synthetic, and/or recombinant, and may comprise post-transcriptional modifications such as glycosylation, added chemical groups, etc. In aspects, the concatemeric polypeptides can be either in neutral (uncharged) or salt forms, and may be either free of or include modifications such as glycosylation, side chain oxidation, or phosphorylation. In certain aspects, the concatemeric polypeptides of the instant disclosure can be capped with an n-terminal acetyl and/or c-terminal amino group.

[0014] In aspects, one or more peptides or polypeptides or concatemeric polypeptides of the instant disclosure (e.g., but not limited to, a peptide or polypeptide comprising, consisting, or consisting essentially of an amino acid sequence of SEQ ID NOS: SEQ ID NOS: 4-1676, 1713-2595, 2605-2638, 2647-2718, and 2735-8692 (and/or fragments or variants thereof), and optionally 1 to 12 additional amino acids distributed in any ratio on the N terminus and/or C-terminus of the polypeptide of SEQ ID NOS: SEQ ID NOS: 4-1676, 1713-2595, 2605-2638, 2647-2718, and 2735-8692, or a concatemeric polypeptide comprising, consisting of, or consisting essentially of one or more of SEQ ID NOS: 1677-1692, 2593-2604, 2639-2646, and 2719-2734 (and fragments or variants thereof)), is joined to, linked to (e.g., fused in-frame, chemically-linked, or otherwise bound), and/or inserted into a heterologous polypeptide. In aspects, the one or more peptides or polypeptides or concatemeric polypeptides of the instant disclosure may be joined to, linked to (e.g., fused in-frame, chemically-linked, or otherwise bound), and/or inserted into a heterologous polypeptide as a whole, although it may be made up from a joined to, linked to (e.g., fused in-frame, chemically-linked, or otherwise bound), and/or inserted amino acid sequence, together with flanking amino acids of the heterologous polypeptide.

[0015] In aspects, the present disclosure is directed to a chimeric or fusion polypeptide composition (which in aspects may be isolated, synthetic, or recombinant) comprising one or more peptides, polypeptides, or concatemeric peptides of the present disclosure. In aspects, a chimeric or fusion polypeptide composition of the present disclosure comprises one or more peptides, polypeptides, and/or concatemeric peptides of the present disclosure (e.g., a peptide or polypeptide comprising, consisting of, or consisting essentially of one or more peptides or polypeptides having an amino acid sequence of SEQ ID NOS: 4-1676, 1713-2595, 2605-2638, 2647-2718, and 2735-8692 (and/or fragments or variants thereof), and optionally 1 to 12 additional amino acids distributed in any ratio on the N terminus and/or C-terminus of the polypeptide of SEQ ID NOS: 4-1676, 1713-2595, 2605-2638, 2647-2718, and 2735-8692) joined to, linked to (e.g., fused in-frame, chemically-linked, or otherwise bound), and/or inserted into a heterologous polypeptide In aspects, the one or more peptides, polypeptides, and/or concatemeric peptides of the present disclosure may be inserted into the heterologous polypeptide, may be added to the C-terminus (with or without the use of linkers, as is known in the art), and/or added to the N-terminus (with or without the use of linkers, as is known in the art) of the heterologous polypeptide. In aspects of the above chimeric or fusion polypeptide compositions, the one or more peptide, polypeptides, or concatemeric peptides may be joined to, linked to (e.g., fused in-frame, chemically-linked, or otherwise bound), and/or inserted into a heterologous polypeptide as a whole, although it may be made up from a joined to, linked to (e.g., fused in-frame, chemically-linked, or otherwise bound), and/or inserted amino acid sequence, together with flanking amino acids of the heterologous polypeptide. In aspects, a chimeric or fusion polypeptide composition of the present disclosure comprises a peptide, polypeptide, and/or concatemeric peptide of the instant disclosure, said peptide, polypeptide, and/or concatemeric peptide having a sequence that is not naturally included in the heterologous polypeptide and/or is not located at its natural position in the heterologous polypeptide. For example, in aspects, the one or more peptides, polypeptides, and/or concatemeric peptides of the present disclosure may be inserted into a SARS-CoV-2 sequence in which the SARS-CoV-2 sequence does not include the one or more peptides, polypeptides, and/or concatemeric peptides of the present disclosure (e.g., the SARS-CoV-2 sequence is mutated to not include the one or more peptides, polypeptides, and/or concatemeric peptides of the present disclosure) or the one or more peptides, polypeptides, and/or concatemeric peptides of the present disclosure is inserted into a SARS-CoV-2 sequence but not at its natural position. In aspects, the one or more of peptide, polypeptide, and/or concatemeric peptide of the present disclosure can be joined, linked to (e.g., fused in-frame, chemically-linked, or otherwise bound), and/or inserted into the heterologous polypeptide. In aspects of above-described chimeric or fusion polypeptide compositions, the chimeric or fusion polypeptides may be isolated, synthetic, or recombinant.

[0016] In aspects, the instant disclosure is directed to a nucleic acid (e.g., DNA or RNA, including mRNA) encoding one or more peptides, polypeptides, concatemeric peptides, and/or chimeric or fusion polypeptides as described herein. For example, in aspects, the instant disclosure is directed to a nucleic acid encoding a peptide or polypeptide comprising, consisting of, or consisting essentially of one or more peptides or polypeptides having an amino acid sequence of SEQ ID

[0017] NOS: 4-1676, 1713-2595, 2605-2638, 2647-2718, and 2735-8692 (and/or fragments or variants thereof), and optionally 1 to 12 additional amino acids distributed in any ratio on the N terminus and/or C-terminus of the polypeptide of SEQ ID NOS: 4-1676, 1713-2595, 2605-2638, 2647-2718, and 2735-8692. Additionally, the instant disclosure is directed to a nucleic acid encoding a polypeptide comprising, consisting of, or consisting essentially of one or more peptides or polypeptides having an amino acid sequence off SEQ ID NOS: 1677-1692, 2593-2604, 2639-2646, and 2719-2734. In aspects, the present disclosure is directed to a vector, such as an expression vector, comprising such a nucleic acid as described. In aspects, the present disclosure is directed to expression cassettes, plasmids, expression vectors, recombinant viruses, or cells comprising a nucleic acid as described herein. In aspects, the present disclosure is directed to a cell or vaccine comprising such a vector as described. In aspects, the present disclosure is directed to a cell comprising a vector of the present disclosure.

[0018] In aspects, the instant disclosure is directed to a pharmaceutical composition, the pharmaceutical composition comprising a T-cell epitope compound or composition of the instant disclosure (e.g., one or more of: polypeptides as disclosed herein; concatemeric peptides as disclosed herein; chimeric or fusion polypeptide compositions as disclosed herein; nucleic acids as disclosed herein, including nucleic acids encoding such peptides, polypeptides, concatemeric peptides, or chimeric of fusion polypeptide compositions as disclosed herein; expression cassettes, plasmids, expression vectors, recombinant viruses, cells as disclosed herein) and a pharmaceutically acceptable carrier, excipient, and/or adjuvant. In aspects, the one or more nucleic acids encoding said peptides or polypeptides are DNA, RNA, or mRNA. In aspects of the above-described pharmaceutical compositions, the composition comprises at least 2, at least 3, at least 4, at least 5, at least 6, at least 7, at least 8, at least 9, at least 10, at least 11, at least 12, at least 13, at least 14, at least 15, at least 16, at least 17, at least 18, at least 19, at least 20, at least 25, at least 30, at least 40, at least 50, at least 100, at least 200, at least 300, at least 400, at least 500, at least 600, at least 700, at least 800, at least 900, or at least 1000, peptides, polypeptides, and/or concatemeric peptides, as disclosed herein, including every value or range therebetween.

[0019] In aspects, the instant disclosure is directed to a vaccine comprising a T-cell epitope compound or composition of the instant disclosure (e.g., one or more of: polypeptides as disclosed herein; concatemeric peptides as disclosed herein; chimeric or fusion polypeptide compositions as disclosed herein; nucleic acids as disclosed herein, including nucleic acids encoding such peptides, polypeptides, concatemeric peptides, or chimeric of fusion polypeptide compositions as disclosed herein; expression cassettes, plasmids, expression vectors, recombinant viruses, cells as disclosed herein; pharmaceutical compositions as disclosed herein; or vaccines as described herein) and, optionally, a carrier, excipient, and/or an adjuvant.

[0020] The present disclosure also relates to methods of immunizing or inducing an immune response in a subject, said method comprising administering to said subject one more peptides, polypeptides, concatemeric peptides, chimeric or fusion polypeptides, nucleic acids, expression cassettes, plasmids, expression vectors, recombinant viruses, cells pharmaceutical compositions, or vaccines as described herein. In aspects, the subject is a human. In aspects, the present disclosure is directed to to methods of immunizing or inducing an immune response in a subject, comprising administering to said subject a T-cell epitope compound or composition of the instant disclosure (e.g., one or more of: polypeptides as disclosed herein; concatemeric peptides as disclosed herein; chimeric or fusion polypeptide compositions as disclosed herein; nucleic acids as disclosed herein, including nucleic acids encoding such peptides, polypeptides, concatemeric peptides, or chimeric or fusion polypeptide compositions as disclosed herein; expression cassettes, plasmids, expression vectors, recombinant viruses, cells as disclosed herein; pharmaceutical compositions as disclosed herein; or vaccines as described herein). In aspects, the subject is a human. In aspects, the present disclosure is directed to a method of stimulating, inducing, and/or expanding an immune response to a SARS-CoV-2 infection and/or related diseases caused by SARS-CoV-2, including COVID-19, in a subject, comprising administering to said subject a T-cell epitope compound or composition of the instant disclosure.

[0021] The present disclosure also relates to methods of treating and/or preventing a SARS-CoV-2 infection and/or related diseases caused by SARS-CoV-2, including COVID-19, in a subject, such as a human, comprising administering to said subject a T-cell epitope compound or composition of the instant disclosure (e.g., one or more of: polypeptides as disclosed herein; concatemeric peptides as disclosed herein; chimeric or fusion polypeptide compositions as disclosed herein; nucleic acids as disclosed herein, including nucleic acids encoding such peptides, polypeptides, concatemeric peptides, or chimeric or fusion polypeptide compositions as disclosed herein; expression cassettes, plasmids, expression vectors, recombinant viruses, cells as disclosed herein; pharmaceutical compositions as disclosed herein; or vaccines as described herein).

[0022] As should be understood, the T-cell epitope compounds or compositions of the instant disclosure as described herein may be used to induce an immune response and/or to vaccinate a subject. It is particularly useful to vaccinate against SARS-CoV-2 infection and/or related diseases caused by SARS-CoV-2, including COVID-19.

[0023] In aspects, the instant disclosure provide novel methods, assays, and kits for detecting an immune response, and in aspects a cell-mediated immune (“CMI”) response, including a T cell response (e.g., CD8+ and/or CD4+ T cell response) against SARS-CoV-2 or a related coronavirus, as well as methods, assays, and kits for the diagnosis of a SARS-CoV-2 infection or related coronaviruses infection, as well as diseases caused by SARS-CoV-2, including the highly contagious coronavirus disease 2019. The instantly-disclosed assays, methods, and kits use or include one or more T-cell epitope compounds and composiitons (including peptides or polypeptides) a disclosed herein.

[0024] In aspects, the present disclosure is directed to methods of measuring a CMI response against COVID-19 or a related coronavirus infection in a subject by incubating a sample from the subject which comprises T-cells or other cells of the immune system with one or more peptides or polypeptides of the instant disclosure. In aspects, production of IFN-γ or other cytokine or immune effector molecule(s) is then detected. The presence or level of immune effector is then indicative of the level of cell mediated responsiveness of the subject. In aspects, preferably, the sample is whole blood which is collected in a suitable container comprising the antigen. Optionally, a simple sugar such as dextrose is added to the incubation mixture. Accordingly, one aspect of the present disclosure relates to a method for measuring a CMI response in a subject, said method comprising collecting a sample from said subject wherein said sample comprises cells of the immune system which are capable of producing immune effector molecules following stimulation by an antigen, incubating said sample with one or more peptides or polypeptides of the instant disclosure and then measuring the presence of or elevation in the level of an immune effector molecule wherein the presence or level of said immune effector molecule is indicative of the capacity of said subject to mount a cell-mediated immune response against SARS-CoV-2 or a related coronavirus infection. In aspects, the presence of or elevation in the level of an immune effector molecule wherein the presence or level of said immune effector molecule is indicative of the capacity of said subject to mount a cell-mediated immune response against SARS-CoV-2 or a related coronavirus infection.

[0025] In aspects, the present disclosure is directed to methods of assaying for SARS-CoV-2 or related coronavirus peptide-specific T-cells, the method comprising providing a fluid containing T-cells, adding one or more peptides or polypeptides of the instant disclosure to the fluid, incubating the fluid to cause cytokine release, and detecting the released cytokine. Preferably the method comprises providing the fluid containing T-cells in contact with a surface carrying an immobilized first antibody to the cytokine, adding the peptide or polypeptide to the fluid, incubating the resulting fluid mixture under conditions to cause any peptide or poleypeptide-specific T-cells that have been pre-sensitized in vivo to the peptide or polypeptide to secrete the cytokine, and detecting any secreted cytokine bound to the immobilized first antibody. In aspects, the cells are preferably peripheral blood mononuclear cells (PMBC). They may suitably be taken from a patient known to be suffering, or to have suffered, from COVID-19 infection or a related coronavirus infection. In aspects, the cells used are fresh. In aspects, the assay is used to identify or quantitate peptide or polypeptide-specific T-cells e.g. CD8+ or CD4+ cells that have been activated or pre-sensitized in vivo to a particular peptide or polypeptide. In aspects, these are unrestimulated T-cells, i.e. cells capable of immediate effector function without the need to effect division/differentiation by in vitro culture. When a peptide or polypeptide in question is presented to such cells, the cells secrete various cytokines, of which any one may be selected for the purposes of this assay. In aspects, the cytokine selected is interferon-γ (IFN γ).

[0026] In aspects, the present disclosure provides a method of detecting an anti-SARS-CoV-2 (or related coronavirus) T cell response (which in aspects can included CD4+ and/or CD8+ T cell response) comprising contacting a population of T cells of an individual with a peptide or polypeptide of the instant disclosure, wherein one or more of said peptides or polypeptides may be substituted by an analogue which binds a T cell receptor that recognizes the peptide, and determining whether T cells of the T cell population recognize the peptide(s).

[0027] In aspects, the present disclosure provides a method of diagnosing a SARS-CoV-2 or related coronavirus infection in a host, or exposure of a host, to SARS-CoV-2 or related corornavirus comprising (i) contacting a population of T cells from the host with one or more peptides or analogues as disclosed here, and analogues thereof which can bind a T cell receptor which recognizes any of the said peptides; and (ii) determining whether the T cells of said T cell population recognize the peptide(s) and/or analogue(s).

### BRIEF DESCRIPTION OF THE FIGURES

[0028] The present disclosure may be better understood with reference to the following figures.

[0029] FIG. 1 is an overview of MHC class II cluster selection from the envelope (SEQ ID NO: 1) of SARS-CoV-2. The cluster address given the location of the peptide within the sequences that were provided for analysis. The core peptide (middle amino acids in bold, SEQ ID NO: in parentheses) defines the actual cluster that was identified during the analysis. The stabilizing flanks (N-terminal and C-terminal, not bold) are included for use with the core sequence, and are labeled by the SEQ ID NO: not listed in parentheses. The number of hits is the number of EpiMatrix Z-scores above 1.64 or top 5% found within the sequence. The EpiMatrix Cluster Score is derived from the number of hits normalized for the length of the cluster. Cluster Score is thus the excess or shortfall in predicted aggregate immunogenicity relative to a random peptide standard. Hydrophobicity scores of 2 and above are predictive of difficulty synthesizing peptides.

[0030] FIGS. 2-4 are EpiMatrix Cluster detail reports for identified MHC class II clusters of the envelope (SEQ ID NO: 1) of SARS-CoV-2. Z-score indicates the potential of a 9-mer frame to bind to a given HLA allele; the strength of the score is indicated by the blue shading as noted in the respective Figures. All scores in the Top 5% (Z-Score >1.64) are considered “Hits”. *Scores in the top 10% are considered elevated, other scores are grayed out for simplicity. Frames containing 4 or more alleles scoring above 1.64 are referred to as EpiBars and are highlighted in yellow. These frames have an increased likelihood of binding to HLA. Flanking amino acids, added to stabilize the cluster during in-vitro testing, are presented in blue type face and underlined.

[0031] FIG. 5 is an overview of MHC class II cluster selection from the membrane (SEQ ID NO: 2) of SARS-CoV-2. The cluster address given the location of the peptide within the sequences that were provided for analysis. The core peptide (middle amino acids in bold, SEQ ID NO: in parentheses) defines the actual cluster that was identified during the analysis. The stabilizing flanks (N-terminal and C-terminal, not bold) are included for use with the core sequence, and are labeled by the SEQ ID NO: not listed in parentheses. The number of hits is the number of EpiMatrix Z-scores above 1.64 or top 5% found within the sequence. The EpiMatrix Cluster Score is derived from the number of hits normalized for the length of the cluster. Cluster Score is thus the excess or shortfall in predicted aggregate immunogenicity relative to a random peptide standard. Hydrophobicity scores of 2 and above are predictive of difficulty synthesizing peptides.

[0032] FIGS. 6-15 are EpiMatrix Cluster detail reports for identified MHC class II clusters of the membrane (SEQ ID NO: 2) of SARS-CoV-2. Z-score indicates the potential of a 9-mer frame to bind to a given HLA allele; the strength of the score is indicated by the blue shading as noted in the respective Figures. All scores in the Top 5% (Z-Score >1.64) are considered “Hits”. *Scores in the top 10% are considered elevated, other scores are grayed out for simplicity. Frames containing 4 or more alleles scoring above 1.64 are referred to as EpiBars and are highlighted in yellow. These frames have an increased likelihood of binding to HLA. Flanking amino acids, added to stabilize the cluster during in-vitro testing, are presented in blue type face and underlined.

[0033] FIG. 16 is an overview of MHC class II cluster selection from the spike (SEQ ID NO: 3) of SARS-CoV-2. The cluster address given the location of the peptide within the sequences that were provided for analysis. The core peptide (middle amino acids in bold, SEQ ID NO: in parentheses) defines the actual cluster that was identified during the analysis. The stabilizing flanks (N-terminal and C-terminal, not bold) are included for use with the core sequence, and are labeled by the SEQ ID NO: not listed in parentheses. The number of hits is the number of EpiMatrix Z-scores above 1.64 or top 5% found within the sequence. The EpiMatrix Cluster Score is derived from the number of hits normalized for the length of the cluster. Cluster Score is thus the excess or shortfall in predicted aggregate immunogenicity relative to a random peptide standard. Hydrophobicity scores of 2 and above are predictive of difficulty synthesizing peptides.

[0034] FIGS. 17-55 are EpiMatrix Cluster detail reports for identified MHC class II clusters of the spike (SEQ ID NO: 3) of SARS-CoV-2. Z-score indicates the potential of a 9-mer frame to bind to a given HLA allele; the strength of the score is indicated by the blue shading as noted in the respective Figures. All scores in the Top 5% (Z-Score >1.64) are considered “Hits”. *Scores in the top 10% are considered elevated, other scores are grayed out for simplicity. Frames containing 4 or more alleles scoring above 1.64 are referred to as EpiBars and are highlighted in yellow. These frames have an increased likelihood of binding to HLA. Flanking amino acids, added to stabilize the cluster during in-vitro testing, are presented in blue type face and underlined.

[0035] FIG. 56 is the JanusMatrix reports for identified MHC class II clusters of the envelope (SEQ ID NO: 1) of SARS-CoV-2. *Count of HUMAN JanusMatrix matches found in the search database. With respect to a given EpiMatrix Hit (a 9-mer contained within the input sequence which is predicted to bind to a specific allele), a Janus Matrix match is a 9-mer derived from the search database (e.g., the human genome) which is predicted to bind to the same allele as the EpiMatrix Hit and shares TCR facing contacts with the EpiMatrix Hit. ** Janus Homology Score represents the average depth of coverage in the search database for each EpiMatrix hit in the input sequence. For example, an input peptide with eight EpiMatrix hits, all of which have one match in the search database, has a Janus Homology Score of 1. An input peptide with four EpiMatrix Hits, all of which have two matches in the search database, has a Janus Homology Score of 2. The JanusMatrix Homology Score considers all constituent 9-mers in any given peptide, including flanks.

[0036] FIG. 57 is the JanusMatrix reports for identified MHC class II clusters of the membrane (SEQ ID NO: 2) of SARS-CoV-2. *Count of HUMAN JanusMatrix matches found in the search database. With respect to a given EpiMatrix Hit (a 9-mer contained within the input sequence which is predicted to bind to a specific allele), a Janus Matrix match is a 9-mer derived from the search database (e.g., the human genome) which is predicted to bind to the same allele as the EpiMatrix Hit and shares TCR facing contacts with the EpiMatrix Hit. ** Janus Homology Score represents the average depth of coverage in the search database for each EpiMatrix hit in the input sequence. For example, an input peptide with eight EpiMatrix hits, all of which have one match in the search database, has a Janus Homology Score of 1. An input peptide with four EpiMatrix Hits, all of which have two matches in the search database, has a Janus Homology Score of 2. The JanusMatrix Homology Score considers all constituent 9-mers in any given peptide, including flanks.

[0037] FIG. 58 is the JanusMatrix reports for identified WIC class II clusters of the spike (SEQ ID NO: 3) of SARS-CoV-2. *Count of HUMAN JanusMatrix matches found in the search database. With respect to a given EpiMatrix Hit (a 9-mer contained within the input sequence which is predicted to bind to a specific allele), a Janus Matrix match is a 9-mer derived from the search database (e.g., the human genome) which is predicted to bind to the same allele as the

[0038] EpiMatrix Hit and shares TCR facing contacts with the EpiMatrix Hit. ** Janus Homology Score represents the average depth of coverage in the search database for each EpiMatrix hit in the input sequence. For example, an input peptide with eight EpiMatrix hits, all of which have one match in the search database, has a Janus Homology Score of 1. An input peptide with four EpiMatrix Hits, all of which have two matches in the search database, has a Janus Homology Score of 2. The JanusMatrix Homology Score considers all constituent 9-mers in any given peptide, including flanks.

[0039] FIG. 59 is an EpiMatrix staircase report for identified WIC class I clusters of the envelope (SEQ ID NO: 1) of SARS-CoV-2. Z-score indicates the potential of a 9-mer or 10-mer frame to bind to a given HLA allele; the strength of the score is indicated by the blue shading as noted in the respective Figure. All scores in the Top 5% (Z-Score≥1.64) are considered “Hits”.

[0040] FIG. 60 is an EpiMatrix staircase report for identified MHC class I clusters of the membrane (SEQ ID NO: 2) of SARS-CoV-2. Z-score indicates the potential of a 9-mer or 10-mer frame to bind to a given HLA allele; the strength of the score is indicated by the blue shading as noted in the respective Figure. All scores in the Top 5% (Z-Score≥1.64) are considered “Hits”.

[0041] FIG. 61 is an EpiMatrix staircase report for identified WIC class I clusters of the spike (SEQ ID NO: 3) of SARS-CoV-2. Z-score indicates the potential of a 9-mer or 10-mer frame to bind to a given HLA allele; the strength of the score is indicated by the blue shading as noted in the respective Figure. All scores in the Top 5% (Z-Score≥1.64) are considered “Hits”.

[0042] FIG. 62 shows the sequences of the envelope (SEQ ID NO: 1) of SARS-CoV-2, the membrane (SEQ ID NO: 2) of SARS-CoV-2, and the spike (SEQ ID NO: 3) of SARS-CoV-2.

[0043] FIG. 63A and FIG. 63B, ex vivo immune recall responses differentiate SARS-CoV-2 naïve and experienced individuals and exhibit different COVID-19 immunotypes.

[0044] FIG. 64A and FIG. 64B shows that strong ex vivo immune recall responses are found or may be found in SARS-CoV-2 experienced individuals using polypeptides of the instant disclosure.

[0045] FIG. 65 shows polypeptides of the instant disclosure stimulate ex vivo immune recall response in natural SARS-CoV-2 infection.

[0046] FIG. 66A and FIG. 66B show polypeptides of the instant disclosure stimulate or may stimulate higher IFN-γresponses in naïve and COVID-19 convalescent donors following expansion in culture.

[0047] FIG. 67A and FIG. 67B show polypeptides of the instant disclosure stimulate or may stimulate low frequency epitope-specific T cells following expansion in culture in naïve and COVID-19 convalescent donors.

[0048] FIG. 68 shows polypeptides of the instant disclosure stimulate low frequency epitope-specific T cells following expansion in culture in naïve and COVID-19 convalescent donors.

[0049] FIGS. 69A-69D shows the sequences of the nucleocapsid (SEQ ID NO: 1693), ORF3a (SEQ ID NO: 1694), ORF6 (SEQ ID NO: 1695), ORF7a (SEQ ID NO: 1696), ORF8 (SEQ ID NO: 1697), ORF10 (SEQ ID NO: 1698), ORF1ab non-structural protein 2 (NSP2) (SEQ ID NO: 1699), ORF1ab non-structural protein 3 (NSP3) (SEQ ID NO: 1700), ORF1ab non-structural protein 4 (NSP4) (SEQ ID NO: 1701), ORF1ab 3C-like proteinase (SEQ ID NO: 1702), ORF1ab non-structural protein 6 (NSP6) (SEQ ID NO: 1703), ORF1ab non-structural protein 7 (NSP7) (SEQ ID NO: 1704), ORF1ab non-structural protein 8 (NSP8) (SEQ ID NO: 1705), ORF1ab non-structural protein 9 (NSP9) (SEQ ID NO: 1706), ORF1ab non-structural protein 10 (NSP10) (SEQ ID NO: 1707), ORF1ab RNA-dependent RNA polymerase (SEQ ID NO: 1708), ORF1ab helicase (SEQ ID NO: 1709), ORF1ab 3′-5′ exonuclease (SEQ ID NO: 1710), ORF1ab endoRNase (SEQ ID NO: 1711), and ORF1ab 2′O-ribose methyltransferase proteins (SEQ ID NO: 1712) of SARS-CoV-2.

[0050] FIG. 70 is an overview of MHC class II cluster selection from the various proteins of SARS-CoV-2 with the corresponding SEQ ID NO: in parentheses. The cluster address given the location of the peptide within the sequences that were provided for analysis. The core peptide (middle amino acids in bold, SEQ ID NO: in parentheses) defines the actual cluster that was identified during the analysis. The stabilizing flanks (N-terminal and C-terminal, not bold) are included for use with the core sequence, and are labeled by the SEQ ID NO: not listed in parentheses. The number of hits is the number of EpiMatrix Z-scores above 1.64 or top 5% found within the sequence. The EpiMatrix Cluster Score is derived from the number of hits normalized for the length of the cluster. Cluster Score is thus the excess or shortfall in predicted aggregate immunogenicity relative to a random peptide standard. Hydrophobicity scores of 2 and above are predictive of difficulty synthesizing peptides.

[0051] FIGS. 71-92 are EpiMatrix Cluster detail reports for identified MHC class II clusters of the SARS-CoV-2 peptides of FIG. 70. Z-score indicates the potential of a 9-mer frame to bind to a given HLA allele; the strength of the score is indicated by the blue shading as noted in the respective Figures. All scores in the Top 5% (Z-Score≥1.64) are considered “Hits”. *Scores in the top 10% are considered elevated, other scores are grayed out for simplicity. Frames containing 4 or more alleles scoring above 1.64 are referred to as EpiBars and are highlighted in yellow. These frames have an increased likelihood of binding to HLA. Flanking amino acids, added to stabilize the cluster during in-vitro testing, are presented in blue type face and underlined.

[0052] FIGS. 93-101 are EpiMatrix staircase reports for identified MHC class I clusters of the SARS-CoV-2 peptides of FIG. 70. Z-score indicates the potential of a 9-mer frame to bind to a given HLA allele; the strength of the score is indicated by the blue shading as noted in the respective Figure. All scores in the Top 5% (Z-Score≥1.64) are considered “Hits”.

[0053] FIGS. 102-110 are EpiMatrix staircase reports for identified MHC class II clusters of the SARS-CoV-2 peptides of FIG. 70. Z-score indicates the potential of a 9-mer frame to bind to a given HLA allele; the strength of the score is indicated by the blue shading as noted in the respective Figure. All scores in the Top 5% (Z-Score≥1.64) are considered “Hits”.

[0054] FIGS. 111-119 are EpiMatrix staircase reports for identified MHC class I clusters of the SARS-CoV-2 peptides of FIG. 70. Z-score indicates the potential of a 10-mer frame to bind to a given HLA allele; the strength of the score is indicated by the blue shading as noted in the respective Figure. All scores in the Top 5% (Z-Score≥1.64) are considered “Hits”.

[0055] FIG. 120 shows the sequences of some of the concatemers disclosed herein along with their corresponding sequence identifiers.

[0056] FIGS. 121A-D show predicted SARS-CoV-2 T cell epitopes are antigenic ex vivo in COVID-19 convalescent donors but not healthy donors. (FIG. 121A) Convalescent and pre-SARS-CoV-2 donors (naive) were stimulated with the total peptide pool consisting of our 32 predicted epitopes and IFNγ producing cells were measured by Fluorospot assay. Open circles identify responses to low-dose restimulation. Horizontal line indicates positivity criteria at SFC/10⁶ spenocytes=25. (FIG. 121B) IFNγresponses to individual peptides were also assessed, identifying the breadth of response in individual donors, (FIG. 121C) the frequency of responses to unique peptides within the cohort (vertical lines denote 20% of each cohort), and (FIG. 121D) the depth of response indicated by the frequency of IFNγ-producing, epitope-specific cells, vertical lines indicate positivity criteria at SFC/10⁶ spenocytes=25). *=p<0.05.

[0057] FIGS. 122A-B show SARS-CoV-2 experienced individuals exhibit variable immune recall responses ex vivo. (FIG. 122A) Significant responses to individual peptides (combined per source antigen) identify three distinct immunotype cohorts within covalescent donors (Donor notations; *=pneumonia, **=hospitalized, non-ICU). (FIG. 122B) Correlation of cumulative T cell responses and age according to gender.

[0058] FIGS. 123A-D show antigen-specific T cell expansion increases responses in COVID-19 convalescents and uncovers pre-existing SARS-CoV-2 immunity in healthy donors. (FIG. 123A) PBMCs of convalescent and naive donors were restimulated with the total peptide pool following 8-day expansion culture and IFNγ producing cells were measured by Fluorospot assay. Horizontal line indicates positivity criteria at SFC/10⁶ spenocytes=25. (FIG. 123B) IFNγ responses to individual peptides were also assessed, identifying the breadth of response in individual donors, (FIG. 123C) the frequency of responses to unique peptides within the cohort (vertical lines denote 20% of each cohort), (FIG. 123D) and the depth of response indicated by the frequency of IFNγ-producing, epitope-specific cells (vertical lines indicate positivity criteria at SFC/10⁶ spenocytes=25).

[0059] FIGS. 124A-D show EPV-CoV-19 immunization stimulates strong type 1-skewed T cell responses in HLA-DR3 transgenic mice. Eight days post-boost, murine splenocytes were isolated and assayed for epitope-specific recall responses. Cells were plated in dual IFNγ/IL-4 fluorospot plates, and restimulated with peptide pools for 48 h. (FIG. 124A) Representative images and spot counts are shown for both. (FIG. 124B) IFNγ SFC counts were normalized to 1×10⁶ cells and adjusted by background subtraction, and (FIG. 124C) IFNγ SI index was determined by calculating the fold change of individual restimulation replicates over background. (FIG. 124C) IL-4 SFC and (FIG. 124D) SI were similarly calculated. Horizontal lines denote positivity criteria of SFC>25 and SI>5, respectively. (FIG. 124D) From the reported IFNγ and IL-4 stimulation indexes, we calculated the IFNγ:IL-4 ratio of each restimulation replicate to model the overall skewing of the immune response, identifying a sharply type 1 skewed phenotype in all vaccinated animals. Horizontal lines identify 40, 100, and 1000-fold skewing of type 1/type 2 response.

[0060] (n=17, *=p<0.05, **=p<0.01, ***=p<0.001).

[0061] FIGS. 125A-E show EPV-CoV-19 immunization stimulates type 1-skewed Memory CD4 and CD8 T cells in HLA-DR3 transgenic mice. Splenocytes were restimulated with a vaccine-matched peptide pool 6 hours in the presence of brefeldin A and monensin. Following incubation, cells were stained for surface markers, fixed and permeabilized, stained for intracellular markers, and expression of markers was recorded by flow cytometry. Memory CD4+ T cells and CD8+ T cells were assessed for IFNγ, IL-4, or IL-5-production (both frequency in parent T cell population and mean fluorescence intensity (MFI) of cytokines). (FIG. 125A) Representative images of type 1 and type 2 skewed, epitope-specific memory T cell populations are shown. (FIG. 125B) The fold increase of epitope-specific responses (over CD28 stimulated controls) identify vaccine-specific induction of IFNγ, but not (FIG. 125C) IL-4, or (FIG. 125D) IL-5. (FIG. 125E) From ICS generated data, we calculated the fold increase of IFNγ or IL-4 and/or IL-5 producing cells with peptide restimulation and used the ratio of type 1-to-type 2 responses to model Th-skewing and Tc-skewing in vaccinated animals. (n=17, *=p<0.05, *=p<.01, ***=p<.001)

### DETAILED DESCRIPTION OF THE INVENTION

[0062] The present disclosure generally relates to T-cell epitope-based compounds and compositions, including vaccines, for use against SARS-CoV-2 infection and related diseases caused by SARS-CoV-2, including COVID-19. The disclosure relates to immunogenic peptides, polypeptides, concatemeric peptides, and chimeric or fusion polypeptides and the uses thereof, particularly in pharmaceutical and vaccine compositions. The present disclosure also relates to nucleic acids, vectors (including expression vectors), and cells which express the peptides, polypeptides, concatemeric peptides, and chimeric or fusion polypeptides and the uses thereof. The peptides, polypeptides, concatemeric peptides, and chimeric or fusion polypeptides of the present disclosure more specifically comprise an agretope predicted to be a ligand of HLA class I and/or HLA class II MHC molecules, as well as an epitope that is predicted to be recognized by T-cells (including CD8+ and/or CD4+ T-cells) in the context of MHC class I and/or class II molecules. The instant disclosure is particularly suited to produce vaccines for humans, particularly for vaccinating against coronavirus infection, including SARS-CoV-2 infection and related diseases caused by SARS-CoV-2, including COVID-19.

[0063] It is possible to exploit epitope-specific T-cells to induce an immune response against specific antigens. This discovery has implications for the design of therapeutic regimens and antigen-specific therapies against particular pathogens and infections. The instant disclosure and data relates to identified SARS-CoV-2 T cell epitopes that are recognized in natural infection and stimulate pre-existing immunity to SARS-CoV-2. These epitopes are excellent candidates for T cell-directed vaccine development. A T cell targeting vaccine composed of conserved epitopes may provide rapid, effective and long-term immunity at sites of infection with production of tissue resident memory CD8+ T cells, as well as memory CD4+ T cells that support antibody responses. Influenza vaccination during the 2009 H1N1 pandemic demonstrated that memory CD4+ T cells are able to support naive B cell responses to a novel hemagglutinin. A T cell-directed SARS-CoV-2 vaccine could generate robust CD4+ T cell memory that would provide early control of acute infection with a novel SARS-CoV-2 virus in the absence of pre-existing cross-protective antibodies. Thus, administration of T-cell epitopes, including a T-cell epitope compound or composition of the present disclosure (including one or more of peptides or polypeptides having a sequence comprising, consisting of, or consisting essentially of one or more of SEQ ID NOS: 4-1676, 1713-2595, 2605-2638, 2647-2718, and 2735-8692 and/or fragments and variants thereof, and optionally 1 to 12 additional amino acids distributed in any ratio on the N terminus and/or C-terminus of the polypeptide of SEQ ID NOS: 4-1676, 1713-2595, 2605-2638, 2647-2718, and 2735-8692 as disclosed herein; concatemeric peptides as disclosed herein (including a concatemeric polypeptide of the present disclosure that comprises, consists of, or consists essentially of one or more of SEQ ID NOS: 1677-1692, 2593-2604, 2639-2646, and 2719-2734 and/or fragments and variants thereof); chimeric of fusion polypeptide compositions as disclosed herein; nucleic acids encoding such peptides, polypeptides, concatemeric peptides, or chimeric of fusion polypeptide compositions as disclosed herein; expression cassettes, plasmids, expression vectors, recombinant viruses, or cells which express such peptides, polypeptides, concatemeric peptides or chimeric of fusion polypeptide compositions as disclosed herein; vaccine compositions or formulations as disclosed herein; and/or pharmaceutical compositions or formulations as disclosed herein), optionally in conjunction with a drug (such as an antiviral drug), a protein, or a inactivated or live attenuated virus, can induce an immune response, e.g., against a pathogen, including SARS-CoV-2 and related diseases caused by SARS-CoV-2, including COVID-19. T-cell epitopes, including T-cell epitope compounds and compositions of the present disclosure, can be used to deliberately manipulate the immune system toward immunity.

[0064] For example, the T-cell epitope compounds and compositions of the present disclosure are useful in the selective engagement and activation of immunogenic T-cells. It is demonstrated herein that certain naturally occurring T-cells (in aspects, including CD4+ and CD8+ T-cells), can be engaged, activated, and/or applied to induce immunity or induce an immune response against pathogens such as SARS-CoV-2 and related diseases caused by SARS-CoV-2, including COVID-19. By using the T-cell epitope compounds and compositions of the present disclosure to selectively activate naturally occurring T-cells, it is herein shown that such T-cell epitope compounds and compositions can be used to stimulate, induce, and/or expand an immune response to a coronavirus, including SARS-CoV-2 and related diseases caused by SARS-CoV-2, including COVID-19 in a subject, and thus can be used in methods of treating and/or preventing SARS-CoV-2 and related diseases caused by SARS-CoV-2, including COVID-19 in a subject.

### Definitions

[0065] To further facilitate an understanding of the present disclosure, a number of terms and phrases are defined below. Unless otherwise defined, all terms (including technical and scientific terms) used herein have the same meaning as commonly understood by one of ordinary skill in the art to which this disclosure belongs. It will be further understood that terms such as those defined in commonly used dictionaries, should be interpreted as having a meaning that is consistent with their meaning in the context of the relevant art and the present disclosure, and will not be interpreted in an idealized or overly formal sense unless expressly so defined herein.

[0066] Ranges provided herein are understood to be shorthand for all of the values within the range. For example, a range of 1 to 25 is understood to include any number, combination of numbers, or sub-range from the group consisting of 1, 2, 3, 4, 5, 6, 7, 8, 9, 10, 11, 12, 13, 14, 15, 16, 17, 18, 19, 20, 21, 22, 23, 24, or 25, as well as all intervening decimal values between the aforementioned integers such as, for example, 1.1, 1.2, 1.3, 1.4, 1.5, 1.6, 1.7, 1.8, and 1.9. With respect to sub-ranges, “nested sub-ranges” that extend from either end point of the range are specifically contemplated. For example, a nested sub-range of an exemplary range of 1 to 25 may comprise 1 to 5, 1 to 10, 1 to 15, and 1 to 20 in one direction, or 25 to 20, 25 to 15, 25 to 10, and 25 to 5 in the other direction.

[0067] As used herein, the term “biological sample” as refers to any sample of tissue, cells, or secretions from an organism.

[0068] As used herein, the term “medical condition” includes, but is not limited to, any condition or disease manifested as one or more physical and/or psychological symptoms for which treatment and/or prevention is desirable, and includes previously and newly identified diseases and other disorders.

[0069] As used herein, the term “immune response” refers to the concerted action of lymphocytes, antigen presenting cells, phagocytic cells, granulocytes, and soluble macromolecules produced by the above cells or the liver (including antibodies, cytokines, and complement) that results in selective damage to, destruction of, or elimination from the human body of cancerous cells, metastatic tumor cells, malignant melanoma, invading pathogens (including a virus), cells or tissues infected with pathogens, or, in cases of autoimmunity or pathological inflammation, normal human cells or tissues. In aspects, an immune response includes a measurable cytotoxic T lymphocyte (CTL) response (e.g., against a virus expressing an immunogenic polypeptide) or a measurable B cell response, such as the production of antibodies, (e.g., against an immunogenic polypeptide). One of ordinary skill would know various assays to determine whether an immune response against a peptide, polypeptide, or related composition was generated, including use of the experiments and assays as disclosed in the Examples herein. Various B lymphocyte and T lymphocyte assays are well known, such as ELISAs, Eli Spot assays, cytotoxic T lymphocyte CTL assays, such as chromium release assays, proliferation assays using peripheral blood lymphocytes (PBL), tetramer assays, and other cytokine production assays. See Benjamini et al. (1991), hereby incorporated by reference.

[0070] As used herein, the term “effective amount”, “therapeutically effective amount”, or the like of a composition, including a T-cell epitope compound or composition of the present disclosure (including one or more of peptides or polypeptides having a sequence comprising, consisting of, or consisting essentially of one or more of SEQ ID NOS: 4-1676, 1713-2595, 2605-2638, 2647-2718, and 2735-8692 and/or fragments and variants thereof, and optionally 1 to 12 additional amino acids distributed in any ratio on the N terminus and/or C-terminus of the polypeptide of SEQ ID NOS: 4-1676, 1713-2595, 2605-2638, 2647-2718, and 2735-8692 as disclosed herein; concatemeric peptides as disclosed herein, including concatemeric polypeptides comprising, consisting of, or consisting essentially of one or more of SEQ ID NOS: 1677-1692, 2593-2604, 2639-2646, and 2719-2734 and/or fragments and variants thereof; chimeric of fusion polypeptide compositions as disclosed herein; nucleic acids encoding such peptides, polypeptides, concatemeric peptides, or chimeric of fusion polypeptide compositions as disclosed herein; expression cassettes, plasmids, expression vectors, recombinant viruses, or cells which express such peptides, polypeptides, concatemeric peptides or chimeric of fusion polypeptide compositions as disclosed herein; vaccine compositions or formulations, and/or pharmaceutical compositions or formulations as disclosed herein) is a quantity sufficient to achieve a desired therapeutic and/or prophylactic effect, e.g., an amount that results in the prevention of, or a decrease in, the symptoms and/or underlying causes associated with a disease that is being treated, such as SARS-CoV-2 infection and related diseases caused by SARS-CoV-2, including COVID-19, or an amount to measurably to inhibit inhibit virus (for example, SARS-CoV-2) replication or infectivity. The amount of a composition of the present disclosure administered to the subject will depend on the type and severity of the disease and on the characteristics of the individual, such as general health, age, sex, body weight and tolerance to drugs. It will also depend on the degree, severity and type of disease. The skilled artisan will be able to determine appropriate dosages depending on these and other factors. The T-cell epitope compounds and compositions of the present invention can also be administered in combination with each other or with one or more additional therapeutic compounds.

[0071] As used herein, “anti-SARS-CoV-2 activity”, “anti-SARS-CoV-2 polypeptides”, “anti-SARS-CoV-2 compounds and compositions”, and the like are intended to mean that the T-cell epitope compounds and compositions of the of the present diclsoure (including polypeptides, concatemeric polypeptides, chimeric or fusion proteins, nucleic acids, plasmids, vectors, pharmaceutical compositions, vaccines, and other compositions of the instant disclosure) have anti-SARS-CoV-2 activity and thus are capable of suppressing, controlling, and/or killing an invading SARS-CoV-2 virus. For example, anti-SARS-CoV-2 activity means that the instantly-disclosed therapeutic T-cell epitope comopounds and compositions are, in aspects: capable of stimulating, inducing, and/or expanding an immune response to SARS-CoV-2 (e.g., a cellular (CD4+ and/or CD8+ T-cell response) or humoral immune response to SARS-CoV-2) and/or associated diseases in a subject; capable of stimulating, inducing, and/or expanding a SARS-CoV-2-specific IFNγ response (e.g., by lymphocytes such as PMBC, or effector CD4+ and/or CD8+ T-cells), capable of inhibiting SARS-CoV-2 viral replication or infectivity, and/or capable of inducing immunity against SARS-CoV-2. In aspects, a T-cell epitope compound or composition of the present disclosure having anti-SARS-CoV-2 activity will reduce the disease symptoms resulting from SARS-CoV-2 challenge by at least about 5% to about 50%, at least about 10% to about 60%, at least about 30% to about 70%, at least about 40% to about 80%, or at least about 50% to about 90% or greater, including any value or range therebetween. Anti-SARS-CoV-2 activity can be determined by various experiments and assays as known to those of skill in the art, including methods such as by antibody titrations of sera, e.g., by ELISA and/or seroneutralization assay analysis and/or by vaccination challenge evaluation, including use of experiments and assays as disclosed in the Examples herein.

[0072] As used herein, the term “T-cell epitope” means an MHC ligand or protein determinant, 7 to 30 amino acids in length, and capable of specific binding to human leukocyte antigen (HLA) molecules and interacting with specific T cell receptors (TCRs). As used herein, in the context of a T cell epitope that is known or determined (e.g. predicted) to engage a T cell, the terms “engage”, “engagement” or the like means that when bound to a MHC molecule (e.g. human leukocyte antigen (HLA) molecules), the T cell epitope is capable of interacting with the TCR of the T cell and activating the T cell. Generally, T-cell epitopes are linear and do not express specific three-dimensional characteristics. T-cell epitopes are not affected by the presence of denaturing solvents. The ability to interact with T-cell epitopes can be predicted by in silico methods (De Groot A S et al., (1997), AIDS Res Hum Retroviruses, 13(7):539-41; Schafer J R et al., (1998), Vaccine, 16(19):1880-4; De Groot A S et al., (2001), Vaccine, 19(31):4385-95; De Groot A R et al. ,(2003), Vaccine, 21(27-30):4486-504, all of which are herein incorporated by reference in their entirety.

[0073] As used herein, the term “T-cell epitope cluster” refers to polypeptide that contains between about 4 to about 40 MHC binding motifs. In particular embodiments, the T-cell epitope cluster contains between about 5 to about 35 MHC binding motifs, between about 8 and about 30 MHC binding motifs; and between about 10 and 20 MHC binding motifs.

[0074] As used herein, the term “immune-stimulating T-cell epitope polypeptide” refers to a molecule capable of inducing an immune response, e.g., a humoral, T cell-based, or innate immune response.

[0075] As used herein, the term “regulatory T cell”, “Treg” or the like, means a subpopulation of T cells that suppress immune effector function, including the suppression or down regulation of CD4+ and/or CD8+ effector T cell (Teff) induction, proliferation, and/or cytokine production, through a variety of different mechanisms including cell-cell contact and suppressive cytokine production. In aspects, CD4+ Tregs are characterized by the presence of certain cell surface markers including but not limited to CD4, CD25, and FoxP3. In aspects, upon activation, CD4+ regulatory T cells secrete immune suppressive cytokines and chemokines including but not limited to IL-10 and/or TGFβ. CD4+ Tregs may also exert immune suppressive effects through direct killing of target cells, characterized by the expression upon activation of effector molecules including but not limited to granzyme B and perforin. In aspects, CD8+ Tregs are characterized by the presence of certain cell surface markers including but not limited to CD8, CD25, and, upon activation, FoxP3. In aspects, upon activation, regulatory CD8+ T cells secrete immune suppressive cytokines and chemokines including but not limited to IFNγ, IL-10, and/or TGFβ. In aspects, CD8+ Tregs may also exert immune suppressive effects through direct killing of target cells, characterized by the expression upon activation of effector molecules including but not limited to granzyme B and/or perforin.

[0076] As used herein, the term “regulatory T cell epitope” (“Tregitope”) refers to a “T cell epitope” that causes a tolerogenic response (Weber CA et al., (2009), Adv Drug Deliv, 61(11):965-76) and is capable of binding to MHC molecules and engaging (i.e.interacting with and activating) circulating naturally occurring Tregs (in aspects, including natural Tregs and/or adaptive Tregs). In aspects, upon activation, CD4+ regulatory T cells secrete immune suppressive cytokines and chemokines including but not limited to IL-10 and/or TGFβ. CD4+ Tregs may also exert immune suppressive effects through direct killing of target cells, characetized by the expression upon activation of effector molecules including but not limited to granzyme B and perforin.leads to the expression of the immune suppressive cytokines including, but not limited to, IL-10 and TGF-f3 and TNF-α. In aspects, upon activation, regulatory CD8+ T cells secrete immune suppressive cytokines and chemokines including but not limited to IFNγ, IL-10, and/or TGFβ. In aspects, CD8+ Tregs may also exert immune suppressive effects through direct killing of target cells, characetized by the expression upon activation of effector molecules including but not limited to granzyme B and/or perforin.

[0077] As used herein, the term “B-cell epitope” means a protein determinant capable of specific binding to an antibody. B-cell epitopes usually consist of chemically active surface groupings of molecules such as amino acids or sugar side chains and usually have specific three-dimensional structural characteristics, as well as specific charge characteristics. Conformational and non-conformational epitopes are distinguished in that the binding to the former but not the latter is lost in the presence of denaturing solvents.

[0078] The term “subject” as used herein refers to any living organism in which an immune response is elicited. The term subject includes, but is not limited to, humans, nonhuman primates such as chimpanzees and other apes and monkey species; farm animals such as cattle, sheep, pigs, goats and horses; domestic mammals such as dogs and cats; laboratory animals including rodents such as mice, rats and guinea pigs, and the like. The term does not denote a particular age or sex. Thus, adult and newborn subjects, as well as fetuses, whether male or female, are intended to be covered.

[0079] As used herein, the terms “the major histocompatibility complex (MHC)”, “MHC molecules”, “MHC proteins” or “HLA proteins” are to be understood as meaning, in particular, proteins capable of binding peptides resulting from the proteolytic cleavage of protein antigens and representing potential T-cell epitopes, transporting them to the cell surface and presenting them there to specific cells, in particular cytotoxic T-lymphocytes or T-helper cells. The major histocompatibility complex in the genome comprises the genetic region whose gene products expressed on the cell surface are important for binding and presenting endogenous and/or foreign antigens and thus for regulating immunological processes. The major histocompatibility complex is classified into two gene groups coding for different proteins, namely molecules of MEW class I and molecules of MHC class II. The molecules of the two MHC classes are specialized for different antigen sources. The molecules of MHC class I present endogenously synthesized antigens, for example viral proteins and tumor antigens. The molecules of MHC class II present protein antigens originating from exogenous sources, for example bacterial products. The cellular biology and the expression patterns of the two MHC classes are adapted to these different roles. MHC molecules of class I consist of a heavy chain and a light chain and are capable of binding a peptide of about 8 to 11 amino acids, but usually 9 or 10 amino acids, if this peptide has suitable binding motifs, and presenting it to cytotoxic T-lymphocytes. The peptide bound by the MHC molecules of class I originates from an endogenous protein antigen. The heavy chain of the MHC molecules of class I is preferably an HLA-A, HLA-B or HLA-C monomer, and the light chain is β-2-microglobulin. MHC molecules of class II consist of an ≢-chain and a β-chain and are capable of binding a peptide of about 12 to 25 amino acids if this peptide has suitable binding motifs, and presenting it to T-helper cells. The peptide bound by the

[0080] MHC molecules of class II usually originates from an extracellular of exogenous protein antigen. The ≢-chain and the (3-chain are in particular HLA-DR, HLA-DQ and HLA-DP monomers.

[0081] As used herein, the term “MHC complex” refers to a protein complex capable of binding with a specific repertoire of polypeptides known as HLA ligands and transporting said ligands to the cell surface.

[0082] As used herein, the term “MHC Ligand” means a polypeptide capable of binding to one or more specific MHC alleles. The term “HLA ligand” is interchangeable with the term “MHC Ligand”. Cells expressing MHC/Ligand complexes on their surface are referred to as “Antigen Presenting Cells” (APCs). Similarly, as used herein, the term “MHC binding peptide” relates to a peptide which binds to an MHC class I and/or an MHC class II molecule. In the case of MHC class I/peptide complexes, the binding peptides are typically 8-10 amino acids long although longer or shorter peptides may be effective. In the case of MHC class II/peptide complexes, the binding peptides are typically 10-25 amino acids long and are in particular 13-18 amino acids long, whereas longer and shorter peptides may also be effective.

[0083] As used herein, the term “T Cell Receptor” or “TCR” refers to a protein complex expressed by T cells that is capable of engaging a specific repertoire of MHC/Ligand complexes as presented on the surface of cells, such as antigen presenting cells (APCs).

[0084] As used herein, the term “MHC Binding Motif” refers to a pattern of amino acids in a protein sequence that predicts binding to a particular MHC allele.

[0085] As used herein, the term “AAY cleavage motif” refers to the short amino acid motif consisting of the sequence “alanine-alanine-tyrosine” capable of promoting proteasome-mediated cleavage of a peptide or protein, promoting the binding of the transporter associated with antigen processing to a peptide or protein, and/or increasing proteasome degradation at specific sites within a peptide or protein.

[0086] As used herein, the term “immune synapse” means the protein complex formed by the simultaneous engagement of a given T cell epitope to both a cell surface MHC complex and TCR.

[0087] The term “polypeptide” refers to a polymer of amino acids, and not to a specific length; thus, peptides, oligopeptides and proteins are included within the definition of a polypeptide. As used herein, a polypeptide is said to be “isolated” or “purified” when it is substantially free of cellular material when it is isolated from recombinant and non-recombinant cells, or free of chemical precursors or other chemicals when it is chemically synthesized. A peptide or polypeptide (e.g., a polypeptide comprising, consisting of, or consisting essentially of one or more of SEQ ID NOS: 4-1676, 1713-2595, 2605-2638, 2647-2718, and 2735-8692 or variants and fragments thereof, which in aspects may be isolated, synthetic, or recombinant) of the present disclosure, however, can be joined to, linked to, or inserted into another polypeptide (e.g., a heterologous polypeptide) with which it is not normally associated in a cell and still be “isolated” or “purified.” Additionally, one or more T-cell epitopes of the present disclosure can be joined to, linked to, or inserted into another polypeptide wherein said one or more T-cell epitopes of the present disclosure is not naturally included in the polypeptide and/or said one or more T-cell epitopes of the present disclosure is not located at its natural position in the polypeptide. When a polypeptide is recombinantly produced, it can also be substantially free of culture medium, for example, culture medium represents less than about 20%, less than about 10%, or less than about 5% of the volume of the polypeptide preparation.

[0088] As used herein, a “concatemeric” peptide or polypeptide refers to a series of at least two peptides or polypeptides linked together. Such linkages may form of string-of-beads design. In aspects, concatemeric polypeptides of the instant disclosure include concatemeric polypeptides comprising, consisting of, or consisting essentially of one or more of 1677-1692, 2593-2604, 2639-2646, and 2719-2734, and/or fragments and variants thereof (which in aspects may be isolated, synthetic, and/or recombinant). In aspects, earch of the peptides or polypeptides of concatermeric polypeptide may optionally be spaced by one or more linkers, and in further aspects neutral linkers. The term “linker” refers to a peptide added between two peptide domains such as epitopes or vaccine sequences to connect said peptide domains. In aspects, a linker sequence is used to reduce steric hindrance between each one or more identified peptides of the instant disclosure, is well translated, and supports or allows processing of the each one or more identified polypeptides of the instant disclosure. In aspects, the linker should have little or no immunogenic sequence elements. In aspects, each peptide or polypeptide of the concatemeric polypeptide may optionally have one or more linkers, which may optionally be cleavage sensitive sites, adjacent to their N and/or C terminal end. In such a concatemeric peptide, two or more of the peptides may have a cleavage sensitive site between them. Alternatively two or more of the peptides may be connected directly to one another or through a linker that is not a cleavage sensitive site.

[0089] As used herein, the term “pharmaceutically acceptable” refers to approved or approvable by a regulatory agency of the Federal or a state government or listed in the U.S. Pharmacopeia or other generally recognized pharmacopeia for use in animals, including humans.

[0090] As used herein, the term “pharmaceutically acceptable excipient, carrier, or diluent” or the like refer to an excipient, carrier, or diluent that can be administered to a subject, together with an agent, and which does not destroy the pharmacological activity thereof and is nontoxic when administered in doses sufficient to deliver a therapeutic amount of the agent.

[0091] As used herein, the term “purpose built computer program” refers to a computer program designed to fulfill a specific purpose; typically to analyze a specific set of raw data and answer a specific scientific question.

[0092] As used herein, the term “z-score” indicates how many standard deviations an element is from the mean. A z-score can be calculated from the following formula: z=(X−μ)/σ; where z is the z-score, X is the value of the element, μ is the population mean, and σ is the standard deviation.

[0093] As used herein, the singular forms “a,” “an,” and “the” are intended to include the plural forms, including “at least one,” unless the content clearly indicates otherwise. “Or” means “and/or.” As used herein, the term “and/or” and “one or more” includes any and all combinations of the associated listed items. For example, the term “one or more” with respect to the “one or more of SEQ ID NOS: 4-1676, 1713-2595, 2605-2638, 2647-2718, and 2735-8692 of the present disclosure” includes any and all combinations of SEQ ID NOS: 4-1676, 1713-2595, 2605-2638, 2647-2718, and 2735-8692. The term “or a combination thereof” means a combination including at least one of the foregoing elements.

[0094] A “variant” peptide or polypeptide (including a variant T-cell epitope) can differ in amino acid sequence by one or more substitutions, deletions, insertions, inversions, fusions, and truncations or a combination of any of these. In aspects, a variant peptide or polypeptide (including a variant T-cell epitope) can differ in amino acid sequence by one or more substitutions, deletions, insertions, inversions, fusions, and truncations or a combination of any of these provided said variants retain MHC binding propensity and/or TCR specificity, and/or SARS-CoV-2 activity.

[0095] The present disclosure also includes fragments of the peptide or polypeptides of the invention. The disclosure also encompasses fragments of the variants of the T-cell epitopes described herein, provided said fragments and/or variants at least in part retain MHC binding propensity and/or TCR specificity, and/or retain anti-SARS-CoV-2 activity.

[0096] The present disclosure also provides chimeric or fusion polypeptides (which in aspects may be isolated, synthetic, or recombinant) wherein one or more of the instantly-disclosed peptides, polypeptides, or concatemeric peptides is a part thereof. In aspects, a chimeric or fusion polypeptide composition comprises one or more peptides, polypeptides, or concatemeric peptides of the instant disclosure linked to a heterologous polypeptide. As previously stated, the term “heterologous polypeptide” is intended to mean that the one or more T-cell epitopes (e.g., one or more of SEQ ID NOS: 4-1676, 1713-2595, 2605-2638, 2647-2718, and 2735-8692) are heterologous to, or not included naturally, in the heterologous polypeptide. In aspects, the one or more peptides, polypeptides, or concatemeric peptides of the instant disclosure may be inserted into the heterologous polypeptide (e.g., through mutagenesis or other known means in the art), may be added to the C-terminus (with or without the use of linkers, as is known in the art), and/or added to the N-terminus (with or without the use of linkers, as is known in the art) of the heterologous polypeptide. For example, protein engineering by mutagenesis can be performed using site-directed mutagenesis techniques, or other mutagenesis techniques known in the art (see e.g., James A. Brannigan and Anthony J. Wilkinson., 2002, Protein engineering 20 years on. Nature Reviews Molecular Cell Biology 3, 964-970; Turanli-Yildiz B. et al., 2012, Protein Engineering Methods and Applications, intechopen.com, which are herein incorporated by reference in their entirety).

[0097] In aspects, chimeric or fusion polypeptides comprise one or more peptides, polypeptides, or concatemeric peptides of the instant disclosure operatively linked to a heterologous polypeptide. “Operatively linked” indicates that the polypeptide (e.g., the one or more T-cell epitope polypeptides of the present disclosure) and the heterologous protein are fused in-frame or chemically-linked or otherwise bound. In aspects, the instantly-disclosed chimeric or fusion polypeptides may be isolated, synthetic, or recombinant

[0098] An “isolated” peptide, polypeptide, concatemeric peptide (e.g., an isolated T-cell activating T-cell epitope or T-cell epitope polypeptide), or chimeric or fusion polypeptide can be purified from cells that naturally express it, purified from cells that have been altered to express it (recombinant), or synthesized using known protein synthesis methods. In one embodiment, a peptide, polypeptide, or concatemeric peptide is produced by recombinant DNA or RNA techniques. For example, a nucleic acid molecule encoding the peptide, polypeptide, concatemeric peptide, or chimeric or fusion polypeptide is cloned into an expression vector, the expression vector introduced into a host cell and the peptide, polypeptide, concatemeric peptide, or chimeric or fusion polypeptide is expressed in the host cell. The peptide, polypeptide, concatemeric peptide, or chimeric or fusion polypeptide can then be isolated from the cells by an appropriate purification scheme using standard protein purification techniques.

[0099] For the purposes of the present disclosure, peptides, polypeptides, concatemeric peptides, or chimeric or fusion polypeptides of the instant disclosure can include, for example, modified forms of naturally occurring amino acids such as D-stereoisomers, non-naturally occurring amino acids; amino acid analogs; and mimetics. Further, in aspects, peptides, polypeptides, concatemeric peptides, or chimeric or fusion polypeptides of the instant disclosure can include retro-inverso peptides of the instantly disclosed peptides, polypeptides, concatemeric peptides, or chimeric or fusion polypeptides of the instant disclosure, provided said peptides, polypeptides, concatemeric peptides, or chimeric or fusion polypeptides of the instant disclosure at least in part retain WIC binding propensity and/or TCR specificity, and/or retain anti-SARS-CoV-2 activity.

[0100] Although any methods and materials similar or equivalent to those described herein can be used in the practice or testing of the present disclosure, the preferred methods and materials are described. Other features, objects, and advantages of the present disclosure will be apparent from the description and the claims. In the specification and the appended claims, the singular forms include plural referents unless the context clearly dictates otherwise. Unless defined otherwise, all technical and scientific terms used herein have the same meaning as commonly understood by one of ordinary skill in the art to which this disclosure belongs. All references cited herein are incorporated herein by reference in their entirety and for all purposes to the same extent as if each individual publication, patent, or patent application was specifically and individually indicated to be incorporated by reference in its entirety for all purposes.

### Polypeptides, Concatemeric Polypeptides, and Chimeric or Fusion Polypeptides

[0101] In aspects, the present disclosure provides a novel class of T-cell epitopes (which may be isolated, synthetic, or recombinant), which comprise a peptide or polypeptide chain derived from SARS-CoV-2 proteins (e.g., encoded proteins from a SARS-CoV-2 genome), including the envelope, membrane, spike, nucleocapsid, ORF3a, ORF6, ORF7a, ORFS, ORF10, ORF1ab non-structural protein 2 (NSP2), ORF1ab non-structural protein 3 (NSP3), ORF1ab non-structural protein 4 (NSP4), ORF1ab 3C-like proteinase, ORF1ab non-structural protein 6 (NSP6), ORF1ab non-structural protein 7 (NSP7), ORF1ab non-structural protein 8 (NSP8), ORF1ab non-structural protein 9 (NSP9), ORF1 ab non-structural protein 10 (NSP10), ORF1ab RNA-dependent RNA polymerase, ORF1ab helicase, ORF1ab 3′-5′ exonuclease, ORF1ab endoRNase, and ORF1ab 2′O-ribose methyltransferase proteins of SARS-CoV-2. As explained in more detail in the Examples, T-cell epitopes of the present disclosure are highly conserved among known variants of their source proteins, and SARS-CoV-2 (taxid: 2697049), SARS-CoV-1 (taxid: 694009), MERS-CoV (taxid: 1335626), and human CoV (taxids: 11137, 443239, 277944 and 31631) antigen sequences isolated from human hosts were obtained from GenBank at the National Center for Biotechnology Information. SARS-CoV-2 epitopes were compared across sequences obtained from isolates with fully sequenced genomes isolated from December 2019 to December 2020 for T cell epitope mapping. SARS-CoV-2 Wuhan-Hu-1 (GenBank id: MN908947) was selected as the reference strain.

[0102] As further described in the Examples, T-cell epitopes of the present disclosure comprise at least one putative T cell epitope as identified by EpiMatrix™ analysis. EpiMatrix™ is a proprietary computer algorithm developed by EpiVax (Providence, R.I.), which is used to screen protein sequences for the presence of putative T cell epitopes. The algorithm uses matrices for prediction of 9- and 10-mer peptides binding to MHC molecules. Each matrix is based on position-specific coefficients related to amino acid binding affinities that are elucidated by a method similar to, but not identical to, the pocket profile method (Sturniolo, T. et al., Nat. Biotechnol., 17:555-561, 1999). Input sequences are, for example, parsed into overlapping 9-mer frames or 10-mer where each frame overlaps the last by 8 or 9 amino acids, respectively. Each of the resulting frames form the mutated peptide and the non-mutated peptide are then scored for predicted binding affinity with respect to MHC class I alleles (e.g., but not limited to, HLA-A and HLA-B alleles) and MHC class II alleles (e.g., but not limited to HLA-DRB1 alleles). Raw scores are normalized against the scores of a large sample of randomly generated peptides. The resulting “Z” scores are normally distributed and directly comparable across alleles. The resulting “Z” score is reported. In aspects, any 9-mer or 10-mer peptide with an allele-specific EpiMatrix™ Z-score in excess of 1.64, theoretically the top 5% of any given sample, is considered a putative T cell epitope.

[0103] As also further described in the Examples, peptides containing clusters of putative T cell epitopes are more likely to test positive in validating in vitro and in vivo assays. In aspects, the results of the initial EpiMatrix™ analysis are further screened for the presence of putative T cell epitope “clusters” using a second proprietary algorithm known as Clustimer™ algorithm. The Clustimer™ algorithm identifies sub-regions contained within any given amino acid sequence that contains a statistically unusually high number of putative T cell epitopes. Typical T-cell epitope “clusters” range from about 9 to roughly 30 amino acids in length and, considering their affinity to multiple alleles and across multiple 9-mer frames, can contain anywhere from about 4 to about 40 putative T cell epitopes. FIG. 1 is an overview of MHC class II cluster selection from the envelope (SEQ ID NO: 1) of SARS-CoV-2. FIG. 5 is an overview of MHC class II cluster selection from the membrane (SEQ ID NO: 2) of SARS-CoV-2. FIG. 16 is an overview of MHC class II cluster selection from the spike (SEQ ID NO: 3) of SARS-CoV-2. Each epitope cluster identified an aggregate EpiMatrix™ score is calculated by summing the scores of the putative T cell epitopes and subtracting a correcting factor based on the length of the candidate epitope cluster and the expected score of a randomly generated cluster of the same length. EpiMatrix™ cluster scores in excess of +10 are considered significant. In aspects, the T-cell epitopes of the instant disclosure contain several putative T-cell epitopes forming a pattern known as a T-cell epitope cluster.

[0104] FIGS. 2-4 are EpiMatrix Cluster detail reports for identified MHC class II clusters of the envelope (SEQ ID NO: 1) of SARS-CoV-2and relate to SEQ ID NOS: 4-68 and 1003-1005. FIGS. 6-15 are EpiMatrix Cluster detail reports for identified MHC class II clusters of the membrane (SEQ ID NO: 2) of SARS-CoV-2 and relate to SEQ ID NOS: 69-209, 1006-1015, 2255, 2561, and 8691, and 8692. FIGS. 17-55 are EpiMatrix Cluster detail reports for identified MHC class II clusters of the spike (SEQ ID NO: 3) of SARS-CoV-2 and relate to SEQ ID NOS: 210-707 and 1016-1054. FIG. 59 is an EpiMatrix staircase report for identified MHC class I clusters of the envelope (SEQ ID NO: 1) of SARS-CoV-2 and relates to SEQ ID NOS: 708-739. FIG. 60 is an EpiMatrix staircase report for identified MHC class I clusters of the membrane (SEQ ID NO: 2) of SARS-CoV-2 and relates to SEQ ID NOS: 740-851. FIG. 61 is an EpiMatrix staircase report for identified MHC class I clusters of the spike (SEQ ID NO: 3) of SARS-CoV-2 and relates to SEQ ID NOS: 852-1002. FIGS. 71-92 are EpiMatrix Cluster detail reports for identified MHC class II clusters of the SARS-CoV-2 peptides listed in FIG. 70 and relate to SEQ ID NOS: 1713-2010. FIGS. 93-101 are EpiMatrix staircase reports for identified MHC class I clusters of the SARS-CoV-2 peptides identified in FIG. 70 and relate to SEQ ID NOS: 1713-2158. FIGS. 102-110 are EpiMatrix staircase reports for identified MHC class II clusters of the SARS-CoV-2 peptides identified in FIG. 70 and relate to SEQ ID NOS: 1713-2158. FIGS. 111-119 are EpiMatrix staircase reports for identified MHC class I 10mer clusters of the SARS-CoV-2 peptides identified in FIG. 70 and relate to SEQ ID NOS: 2159-2569.

[0105] Putative T-cell epitopes were also screened for cross-conservation with the human proteome using JanusMatrix, as further described in more detail in the Examples. The JanusMatrix system (EpiVax, Providence, R.I.) useful for screening peptide sequences for cross-conservation with a host proteome. JanusMatrix is an algorithm that predicts the potential for cross-reactivity between peptide clusters and the host genome or proteome, based on conservation of TCR-facing residues in their putative MHC ligands. The JanusMatrix algorithm first considers all the predicted epitopes contained within a given protein sequence and divides each predicted epitope into its constituent agretope and epitope. Each sequence is then screened against a database of host proteins. Peptides with a compatible MHC-facing agretope (i.e., the agretopes of both the input peptide and its host counterparty are predicted to bind the same MHC allele) and exactly the same TCR-facing epitope are returned. The JanusMatrix Homology Score suggests a bias towards immune tolerance. In the case of a therapeutic protein, cross-conservation between autologous human epitopes and epitopes in the therapeutic may increase the likelihood that such a candidate will be tolerated by the human immune system. In the case of a vaccine, cross-conservation between human epitopes and the antigenic epitopes may indicate that such a candidate utilizes immune camouflage, thereby evading the immune response and making for an ineffective vaccine. When the host is, for example, a human, the peptide clusters are screened against human genomes and proteomes, based on conservation of TCR-facing residues in their putative HLA ligands. The peptides are then scored using the JanusMatrix Homology Score. In aspects, peptides with a JanusMatrix Homology Score below 2.5 or below 3.0 (and even below 2.0 in certain apsects) indicate low tolerogenicity potential and may be useful for pharmaceutical formulations and vaccines for the treatment/prevention of SARS-CoV-2 infection and related diseases caused by SARS-CoV-2, including COVID-19, and in aspects may be included from the T cell epitope compositions and methods of the present disclosure. In aspects, peptides with a JanusMatrix Homology Score above 3.0 indicate high tolerogenicity potential and may not be useful for pharmaceutical formulations and vaccines for the treatment/prevention of SARS-CoV-2 infection and related diseases caused by SARS-CoV-2, including COVID-19, and in aspects may be excluded from the T cell epitope compositions and methods of the present disclosure. In specific aspects, one or more of a peptide or polypeptide having an amino acid sequence comprising, consisting of, or consisting essentially of one or more of SEQ ID NOS: 1056-1057, 1059, 1367-1368, 1370, 1063, 1068, 101, 1374, 1379, 1382, 1073, 1075, 1083-1084, 1094, 1101, 1103, 1108, 1111, 1112, 1117, 1384, 1386, 1394-1395, 1405, 1412, 1414 1419, 1422, 1423, 1428, 1125, 1436, 1131, 1133, 1134, 1442, 1444, 1445, 1141, 1452, 1142, 1145, 1453, 1456, 1152, 1157, 1159, 1164, 1463, 1468, 1470, 1475,1176, 1178, 1179, 1182, 1204, 1205, 1209, 1214, 1230, 1487, 1489 1490, 1493, 1499, 1515, 1516, 1520, 1525, 1541, 1237, 1245, 1251, 1253, 1548, 1556, 1562, 1564, 1260, 1264, 1266, 1274, 1571, 1575, 1577, 1585, 1275, 1276, 1586, 1587, 1278, 1589, 1284, 1286, 1595, 1597, 1292, 1301, 1303, 1603, 1612, 1614, 1316, 1321, 1329, 1330, and/or 1675 may be excluded from the T cell epitope compounds and compositions, methods, and assays/kitsof the present disclosure. FIG. 56 is the JanusMatrix reports for identified WIC class II clusters of the envelope (SEQ ID NO: 1) of SARS-CoV-2. FIG. 57 is the JanusMatrix reports for identified WIC class II clusters of the membrane (SEQ ID NO: 2) of SARS-CoV-2. FIG. 58 is the JanusMatrix reports for identified WIC class II clusters of the spike (SEQ ID NO: 3) of SARS-CoV-2.

[0106] In aspects, and as also described in further detail in the Examples, T-cell epitopes of the present disclosure are highly conserved among related coronaviruses that infect humans including highly pathogenic SARS-CoV and MERS-CoV and low pathogenicity common cold coronaviruses (CCCs) OC43, HKU1, NL63, and 229E. Prior exposure to these viruses may have established T cell memory that can be recalled upon SARS-CoV-2 infection and vaccination. As well, SARS-CoV-2 infection and vaccination establishes T cell memory that can influence responses in future infections to these viruses or yet-to-emerge coronaviruses. To identify potentially cross-reactive sequences, we screened the TCR-face of select SARS-CoV-2 epitopes for homology with coronaviruses that infect humans, using the JanusMatrix algorithm (e.g., Table 58A and Table 58B). All of the selected membrane and envelope sequences shared identical TCR-face patterns with SARS-CoV. Half the selected spike clusters were unique to SARS-CoV-2 and the other half are conserved with SARS-CoV. Only three selected clusters were cross-conserved outside SARS viruses. Given reports of pre-existing T cell immunity in people with no SARS-CoV-2 experience, we relaxed the requirement for 100% identity at every TCR-face position. Fixing two positions shown to be extensively involved in TCR interactions (positions 5 and 8), JanusMatrix predicted an expanded cross-conservation landscape for selected SARS-CoV-2 spike and membrane clusters. Most selected spike clusters were conserved, by these criteria, in the subset of coronaviruses that infect humans. The remainder of the selected sequences with cross-reactivity potential are cross-conserved among highly pathogenic beta-coronaviruses or among high and low pathogenicity beta-coronaviruses. Only three clusters were unique to SARS-CoV-2 by the cristeria described above, and none are solely conserved with SARS-CoV. The single membrane selected clusters was cross-conserved in the highly pathogenic beta-coronaviruses and coronaviruses that infect humans subsets. As the vast majority of people were not exposed to SARS-CoV and MERS-CoV, we also explored cross-conservation between SARS-CoV-2 and CCCs only. Of the 32 selected peptides, only 2 are SARS-CoV-2-specific. Eighteen clusters (56.6%) are cross-conserved across OC43, HKU1, NL63, and 229E and 12 (37.5%) are cross-conserved in at least one of these four CCCs.

[0107] In aspects, T-cell epitopes of the present disclosure bind to at least one and preferably two or more common HLA class I and/or class II alleles with at least a moderate affinity (e.g., in aspects, <1000 μM IC₅₀, <500 μM IC₅₀, <400 μM IC₅₀, <300 μM IC₅₀, or <200 μM IC₅₀ in HLA binding assays based on soluble HLA molecules). In aspects, T-cell epitopes of the present disclosure are capable of being presented at the cell surface by cells in the context of at least one and, in other aspects, two or more alleles of the HLA. In this context, the epitope-HLA complex can be recognized by CD4+ and/or CD8+ T-cells having TCRs that are specific for the epitope-HLA complex and circulating in subjects. In aspects, the recognition of the epitope-HLA complex can cause the matching T-cell to be activated and to secrete activating cytokines (e.g., effector cytokines such as IFNγ) and chemokines.

[0108] In aspects, a T-cell epitope compounds or compositions of the present disclosure includes one or more peptides or polypeptides a disclosed herein. In aspects, the present disclosure is directed to a peptide or polypeptide having an amino acid sequence comprising, consisting of, or consisting essentially of one or more of SEQ ID NOS: 4-1676, 1713-2595, 2605-2638, 2647-2718, and 2735-8692, or fragments or variants thereof. The phrase “consisting essentially of” is intended to mean that a peptide or polypeptide according to the present disclosure, in addition to the sequence according to any of SEQ ID NOS: 4-1676, 1713-2595, 2605-2638, 2647-2718, and 2735-8692 or a fragment or variant thereof, contains additional amino acids or residues that may be present at either terminus of the peptide and/or on a side chain that are not necessarily forming part of the peptide or polypeptide that functions as an MHC ligand and provided they do not substantially impair the activity of the peptide to function as a T-cell epitope. In aspects, the peptides or polypeptides of the instant disclosure can be either in neutral (uncharged) or salt forms, and may be either free of or include modifications such as glycosylation, side chain oxidation, or phosphorylation. In aspects, the peptides or polypeptides of the instant disclosure can be capped with an n-terminal acetyl and/or c-terminal amino group. In aspects, peptides or polypeptides of the instant disclosure having SEQ ID NOS: 1055, 1058-1060, 1062, 1065-1066, 1069-1072, 1075, 1078, 1081-1087, 1089, 1091-1094, 1100, 1106, 1110-1113, 1115 and 1366, 1369-1371, 1373, 1376-1377, 1379-1383, 1385-1386, 1389, 1391-1400, 1402-1404, 1407, 1411-1419, 1421-1424, 1426-1427, 1118-1365, and 1429-1676 are capped with an n-terminal acetyl and a c-terminal amino group. In aspects, peptides or polypeptides of the instant disclosure having SEQ ID NOS: 1068, 1074, 1080, 1088, 1096, 1101-1105, 1107-1108, and 1116 are capped with an n-terminal acetyl and are not capped at the c-terminus. Table 1 describes the cluster address and gives the location of the peptide within exemplary selected sequences that were provided for analysis. Table 1 describes the core peptide (middle amino acids in bold, SEQ ID NO: in parentheses) which defines the actual cluster that was identified during the analysis. The stabilizing flanks (N-terminal and C-terminal, not bold) are included for use with the core sequence in cetain aspects, with the full sequence of the cluster and flanks being labeled in Table 1 by the SEQ ID NO: not listed in parentheses.

TABLE 1

| | | | Sequence | | | | | |
|---|---|---|---|---|---|---|---|---|
| | | | (cluster sequence | | | | | |
| | | | is bolded, | | | | | |
| | | Se- | while flanks are | | EpiMatrix | EpiMatrix | Number | |
| | | quence | not bolded, | | Hits | Cluster | of | |
| SEQ | | Address | mutations | Class | (Class II | Score | Human | Janus |
| ID | Input | (w/ | from WT are | I | w/o | (w/o | Se- | Homology |
| NO: | Sequence | Flanks) | italicized) | Hits | Flanks) | Flanks) | quences | Score |
| 1055 | ENVELOPE | 0001-0015 | MYS:FVSEETGTL:IVN | 13 | 5 | 9.73 | 2 | 1.50 |
| (1366) | (SEQ ID NO: 1) | | | | | | | |
| 1056 | ENVELOPE | 0007-0024 | EET:GTLIVNSVLLFL:AFV | 11 | 15 | 26.56 | 22 | 2.72 |
| (1367) | (SEQ ID NO: 1) | | | | | | | |
| 1057 | ENVELOPE | 0014-0036 | VNS:VLLFLAFVVFLLVTL:A | 26 | 22 | 40.15 | 46 | 3.48 |
| (1368) | (SEQ ID NO: 1) | | | | | | | |
| 1058 | ENVELOPE | 0054-0069 | PSF:YVYSRVKNLNS:SR | 7 | 16 | 32.67 | 13 | 0.90 |
| (1369) | (SEQ ID NO: 1) | | | | | | | |
| 1059 | ENVELOPE | 0060-0072 | S:RVKNLNSSRV:PD | 1 | 11 | 23.21 | 15 | 3.00 |
| (1370) | (SEQ ID NO: 1) | | | | | | | |
| 1060 | MEMBRANE | 0013-0027 | LKK:LLEQWNLVI:GFL | 9 | 4 | 7.03 | 6 | 1.40 |
| (1371) | (SEQ ID NO: 2) | | | | | | | |
| 1061 | MEMBRANE | 0017-0031 | LEQ:WNLVIGFLF:LTW | 17 | 4 | 8.76 | 3 | 1.00 |
| (1372) | (SEQ ID NO: 2) | | | | | | | |
| 1062 | MEMBRANE | 0032-0048 | ISL:LQFAYANRNRF:LYI | 9 | 14 | 26.89 | 2 | 0.73 |
| (1373) | (SEQ ID NO: 2) | | | | | | | |
| 1063 | MEMBRANE | 0042-0060 | RNR:FLYIIKLIFLWLL:WPV | 29 | 15 | 27.53 | 8 | 1.56 |
| (1374) | (SEQ ID NO: 2) | | | | | | | |
| 1064 | MEMBRANE | 0062-0076 | LAC:FVLAAVYRI:NWI | 4 | 9 | 19.44 | 3 | 0.80 |
| (1375) | (SEQ ID NO: 2) | | | | | | | |
| 1065 | MEMBRANE | 0093-0107 | LSY:FIASFRLFA:RTR | 10 | 8 | 18.15 | 5 | 0.56 |
| (1376) | (SEQ ID NO: 2) | | | | | | | |
| 1066 | MEMBRANE | 0097-0113 | IAS:FRLFARTRSMWS:FN | 11 | 13 | 23.84 | 5 | 0.80 |
| (1377) | (SEQ ID NO: 2) | | | | | | | |
| 1067 | MEMBRANE | 0109-0122 | MWS:FNPETNILL:NV | 7 | 4 | 8.21 | 2 | 1.25 |
| (1378) | (SEQ ID NO: 2) | | | | | | | |
| 1068 | MEMBRANE | 0115-0129 | ETN:ILLNVPLHG:TIL | 3 | 8 | 16.48 | 9 | 2.45 |
| (1379) | (SEQ ID NO: 2) | | | | | | | |
| 1069 | MEMBRANE | 0146-0160 | RGH:LRIAGHHLG:RSD | 2 | 6 | 10.96 | 1 | 0.14 |
| (1380) | (SEQ ID NO: 2) | | | | | | | |
| 1070 | MEMBRANE | 0165-0179 | PKE:ITVATSRTL:SYY | 11 | 5 | 9.81 | 1 | 0.14 |
| (1381) | (SEQ ID NO: 2) | | | | | | | |
| 1071 | MEMBRANE | 0175-0190 | TLS:YYKLGASQRV:AGD | 4 | 9 | 17.64 | 8 | 1.83 |
| (1382) | (SEQ ID NO: 2) | | | | | | | |
| 1072 | MEMBRANE | 0201-0217 | IGN:YKLNTDHSSSS:DNI | 5 | 8 | 14.38 | 4 | 0.78 |
| (1383) | (SEQ ID NO: 2) | | | | | | | |
| 1073 | SPIKE | 0001-0016 | M:FVFLVLLPLVSS:QCV | 10 | 26 | 53.39 | 63 | 4.03 |
| (1384) | (SEQ ID NO: | | | | | | | |
| | 3) | | | | | | | |
| 1074 | SPIKE | 0025-0038 | PPA:YTNSFTRGV:YY | 10 | 6 | 12.80 | 1 | 0.17 |
| (1385) | (SEQ ID NO: | | | | | | | |
| | 3) | | | | | | | |
| 1075 | SPIKE | 0040-0054 | DKV:FRSSVLHST:QDL | 3 | 5 | 9.51 | 11 | 1.92 |
| (1386) | (SEQ ID NO: | | | | | | | |
| | 3) | | | | | | | |
| 1076 | SPIKE | 0052-0066 | QDL:FLPFFSNVT:WFH | 14 | 7 | 14.42 | 2 | 0.22 |
| (1387) | (SEQ ID NO: | | | | | | | |
| | 3) | | | | | | | |
| 1077 | SPIKE | 0061-0076 | NVT:WFHAIHVSGT:NGT | 2 | 9 | 17.97 | 2 | 0.54 |
| (1388) | (SEQ ID NO: | | | | | | | |
| | 3) | | | | | | | |
| 1078 | SPIKE | 0087-0102 | NEG:VYFASTEKSNI:IR | 4 | 7 | 10.83 | 2 | 0.29 |
| (1389) | (SEQ ID NO: | | | | | | | |
| | 3) | | | | | | | |
| 1079 | SPIKE | 0114-0130 | TQS:LLIVNNATNVVI:KV | 5 | 20 | 36.68 | 9 | 0.52 |
| (1390) | (SEQ ID NO: | | | | | | | |
| | 3) | | | | | | | |
| 1080 | SPIKE | 0140-0156 | FLG:VYYHKNNKSWM:ES | 6 | 11 | 20.72 | 0 | 0.00 |
| (1391) | (SEQ ID NO: | | E | | | | | |
| | 3) | | | | | | | |
| 1081 | SPIKE | 0154-0171 | ESE:FRVYSSANNCTF:EYV | 17 | 11 | 18.25 | 1 | 0.09 |
| (1392) | (SEQ ID NO: | | | | | | | |
| | 3) | | | | | | | |
| 1082 | SPIKE | 0198-0212 | DGY:FKIYSKHTP:INL | 8 | 3 | 5.48 | 1 | 0.08 |
| (1393) | (SEQ ID NO: | | | | | | | |
| | 3) | | | | | | | |
| 1083 | SPIKE | 0207-0221 | HTP:INLVRDLPQ:GFS | 3 | 5 | 9.53 | 17 | 4.25 |
| (1394) | (SEQ ID NO: | | | | | | | |
| | 3) | | | | | | | |
| 1084 | SPIKE | 0232-0248 | GIN:ITRFQTLLALHR:SY | 10 | 16 | 31.53 | 11 | 1.47 |
| (1395) | (SEQ ID NO: | | | | | | | |
| | 3) | | | | | | | |
| 1085 | SPIKE | 0239-0255 | QT:LLALHRSYLTPG:DSS | 10 | 14 | 25.33 | 7 | 0.53 |
| (1396) | (SEQ ID NO: | | | | | | | |
| | 3) | | | | | | | |
| 1086 | SPIKE | 0272-0288 | PRT:FLLKYNENGTI:TDA | 2 | 11 | 18.68 | 3 | 0.31 |
| (1397) | (SEQ ID NO: | | | | | | | |
| | 3) | | | | | | | |
| 1087 | SPIKE | 0315-0329 | TSN:FRVQPTESI:VRF | 1 | 6 | 10.62 | 0 | 0.00 |
| (1398) | (SEQ ID NO: | | | | | | | |
| | 3) | | | | | | | |
| 1088 | SPIKE | 0338-0352 | FGE:VFNATRFAS:VYA | 6 | 4 | 6.48 | 3 | 0.38 |
| (1399) | (SEQ ID NO: | | | | | | | |
| | 3) | | | | | | | |
| 1089 | SPIKE | 0347-0364 | FAS:VYAWNRKRISNC:VA | 5 | 7 | 11.13 | 3 | 0.63 |
| (1400) | (SEQ ID NO: | | D | | | | | |
| | 3) | | | | | | | |
| 1090 | SPIKE | 0362-0378 | VAD:YSVLYNSASFST:FK | 14 | 18 | 33.15 | 11 | 0.95 |
| (1401) | (SEQ ID NO: | | | | | | | |
| | 3) | | | | | | | |
| 1091 | SPIKE | 0446-0468 | GGN:YNYLYRLFRKSNLKP | 14 | 31 | 58.68 | 14 | 1.10 |
| (1402) | (SEQ ID NO: | | FE:RDI | | | | | |
| | 3) | | | | | | | |
| 1092 | SPIKE | 0483-0500 | VEG:FNCYFPLQSYGF:QP | 10 | 11 | 17.96 | 0 | 0.00 |
| (1403) | (SEQ ID NO: | | T | | | | | |
| | 3) | | | | | | | |
| 1093 | SPIKE | 0492-0508 | LQS:YGFQPTNGVGY:QPY | 3 | 7 | 10.08 | 1 | 0.14 |
| (1404) | (SEQ ID NO: | | | | | | | |
| | 3) | | | | | | | |
| 1094 | SPIKE | 0508-0522 | YRV:VVLSFELLH:APA | 5 | 3 | 4.88 | 30 | 7.57 |
| (1405) | (SEQ ID NO: | | | | | | | |
| | 3) | | | | | | | |
| 1095 | SPIKE | 0512-0526 | VLS:FELLHAPAT:VCG | 4 | 7 | 14.88 | 4 | 0.75 |
| (1406) | (SEQ ID NO: | | | | | | | |
| | 3) | | | | | | | |
| 1096 | SPIKE | 0536-0549 | NKS:VNFNFNGLT:GT | 2 | 7 | 12.54 | 0 | 0.00 |
| (1407) | (SEQ ID NO: | | | | | | | |
| | 3) | | | | | | | |
| 1097 | SPIKE | 0540-0554 | NFN:FNGLTGTGV:LTE | 0 | 5 | 9.07 | 0 | 0.00 |
| (1408) | (SEQ ID NO: | | | | | | | |
| | 3) | | | | | | | |
| 1098 | SPIKE | 0715-0729 | PTN:FTISVTTEI:LPV | 8 | 6 | 12.63 | 0 | 0.00 |
| (1409) | (SEQ ID NO: | | | | | | | |
| | 3) | | | | | | | |
| 1099 | SPIKE | 0753-0774 | LLQ:YGSFCTQLNRALTGI | 10 | 18 | 27.90 | 8 | 0.50 |
| (1410) | (SEQ ID NO: | | A:VEQ | | | | | |
| | 3) | | | | | | | |
| 1100 | SPIKE | 0797-0816 | FGG:FNFSQILPDPSKPS:K | 4 | 8 | 10.25 | 1 | 0.13 |
| (1411) | (SEQ ID NO: | | RS | | | | | |
| | 3) | | | | | | | |
| 1101 | SPIKE | 0818-0831 | IED:LLFNKVTLA:DA | 3 | 4 | 7.44 | 13 | 2.22 |
| (1412) | (SEQ ID NO: | | | | | | | |
| | 3) | | | | | | | |
| 1102 | SPIKE | 0852-0869 | AQK:FNGLTVLPPLLT:DE | 4 | 10 | 15.82 | 8 | 1.64 |
| (1413) | (SEQ ID NO: | | M | | | | | |
| | 3) | | | | | | | |
| 1103 | SPIKE | 0856-0869 | NG:LTVLPPLLT:DEM | 3 | 6 | 10.67 | 5 | 1.83 |
| (1414) | (SEQ ID NO: | | | | | | | |
| | 3) | | | | | | | |
| 1104 | SPIKE | 0866-0879 | TDE:MIAQYTSALL:A | 8 | 10 | 17.71 | 3 | 0.30 |
| (1415) | (SEQ ID NO: | | | | | | | |
| | 3) | | | | | | | |
| 1105 | SPIKE | 0895-0911 | LQIP:FAMQMAYRFNG:IG | 15 | 7 | 10.20 | 0 | 0.00 |
| (1416) | (SEQ ID NO: | | V | | | | | |
| | 3) | | | | | | | |
| 1106 | SPIKE | 0920-0934 | QKL:IANQFNSAI:GKI | 7 | 5 | 8.58 | 2 | 0.29 |
| (1417) | (SEQ ID NO: | | | | | | | |
| | 3) | | | | | | | |
| 1107 | SPIKE | 0924-0938 | ANQ:FNSAIGKIQ:DSL | 2 | 7 | 14.98 | 5 | 2.00 |
| (1418) | (SEQ ID NO: | | | | | | | |
| | 3) | | | | | | | |
| 1108 | SPIKE | 0934-0949 | IQD:SLSSTASALG:KLQ | 6 | 7 | 11.21 | 17 | 3.11 |
| (1419) | (SEQ ID NO: | | | | | | | |
| | 3) | | | | | | | |
| 1109 | SPIKE | 0960-0974 | NTL:VKQLSSNFG:AIS | 5 | 8 | 17.90 | 9 | 1.40 |
| (1420) | (SEQ ID NO: | | | | | | | |
| | 3) | | | | | | | |
| 1110 | SPIKE | 0998-1012 | TGR:LQSLQTYVT:QQL | 3 | 6 | 12.24 | 1 | 0.14 |
| (1421) | (SEQ ID NO: | | | | | | | |
| | 3) | | | | | | | |
| 1111 | SPIKE | 1010-1024 | QQL:IRAAEIRAS:ANL | 2 | 4 | 6.75 | 6 | 1.40 |
| (1422) | (SEQ ID NO: | | | | | | | |
| | 3) | | | | | | | |
| 1112 | SPIKE | 1015-1029 | AAE:IRASANLAA:TKM | 6 | 8 | 18.74 | 14 | 3.40 |
| (1423) | (SEQ ID NO: | | | | | | | |
| | 3) | | | | | | | |
| 1113 | SPIKE | 1044-1058 | GKG:YHLMSFPQS:APH | 4 | 4 | 7.89 | 3 | 0.67 |
| (1424) | (SEQ ID NO: | | | | | | | |
| | 3) | | | | | | | |
| 1114 | SPIKE | 1127-1141 | DV:VIGIVNNTVY:DPL | 5 | 9 | 16.52 | 1 | 0.44 |
| (1425) | (SEQ ID NO: | | | | | | | |
| | 3) | | | | | | | |
| 1115 | SPIKE | 1152-1166 | LDK:YFKNHTSPDV:DL | 2 | 7 | 12.63 | 0 | 0.00 |
| (1426) | (SEQ ID NO: | | | | | | | |
| | 3) | | | | | | | |
| 1116 | SPIKE | 1169-1183 | ISG:INASVVNIQ:KEI | 4 | 6 | 12.24 | 5 | 1.00 |
| (1427) | (SEQ ID NO: | | | | | | | |
| | 3) | | | | | | | |
| 1117 | SPIKE | 1214-1228 | WYI:WLGFIAGLI:AIV | 9 | 7 | 14.24 | 12 | 2.42 |
| (1428) | (SEQ ID NO: | | | | | | | |
| | 3) | | | | | | | |
| 1118 | MEMBRANE | 0032-0048 | ICL:LQFAYANRNRF:LYI | 9 | 14 | 26.89 | 2 | 0.73 |
| (1429) | (SEQ ID NO: 2) | | | | | | | |
| 1119 | MEMBRANE | 0146-0160 | RGH:LRIAGHHLG:RCD | 2 | 6 | 10.96 | 1 | 0.14 |
| (1430) | (SEQ ID NO: 2) | | | | | | | |
| 1120 | SPIKE | 0087-0102 | NDG:VYFASTEKSNI:IR | 4 | 7 | 10.83 | 2 | 0.29 |
| (1431) | (SEQ ID NO: | | | | | | | |
| | 3) | | | | | | | |
| 1121 | SPIKE | 0347-0364 | FAS:VYAWNRKRISNS:VA | 5 | 7 | 11.13 | 3 | 0.63 |
| (1432) | (SEQ ID NO: | | D | | | | | |
| | 3) | | | | | | | |
| 1122 | SPIKE | 0536-0549 | NKC:VNFNFNGLT:GT | 2 | 7 | 12.54 | 0 | 0.00 |
| (1433) | (SEQ ID NO: | | | | | | | |
| | 3) | | | | | | | |
| 1123 | SPIKE | 0895-0911 | QIP:FAMQMAYRFNG:IG | 15 | 7 | 10.20 | 0 | 0.00 |
| (1434) | (SEQ ID NO: | | V | | | | | |
| | 3) | | | | | | | |
| 1124 | NUCLEOCAPS | 081-098 | DDQ:IGYYRRATRRIR:GG | 4 | 12 | 22.85 | 5 | 0.77 |
| (1435) | ID | | D | | | | | |
| | (SEQ ID NO: | | | | | | | |
| | 1693) | | | | | | | |
| 1125 | NUCLEOCAPS | 154-168 | NAA:IVLQLPQGT:TLP | 2 | 6 | 10.05 | 8 | 4.00 |
| (1436) | ID | | | | | | | |
| | (SEQ ID NO: | | | | | | | |
| | 1693) | | | | | | | |
| 1126 | NUCLEOCAPS | 224-238 | LDR:LNQLESKMS:GKG | 3 | 7 | 14.25 | 8 | 0.80 |
| (1437) | ID | | | | | | | |
| | (SEQ ID NO: | | | | | | | |
| | 1693) | | | | | | | |
| 1127 | NUCLEOCAPS | 346-362 | FKD:QVILLNKHIDA:YKT | 7 | 12 | 20.41 | 3 | 0.58 |
| (1438) | ID | | | | | | | |
| | (SEQ ID NO: | | | | | | | |
| | 1693) | | | | | | | |
| 1128 | NUCLEOCAPS | 402-419 | DFS:KQLQQSMSSADS:T | 2 | 11 | 18.34 | 6 | 0.67 |
| (1439) | ID | | QA | | | | | |
| | (SEQ ID NO: | | | | | | | |
| | 1693) | | | | | | | |
| 1129 | ORF3A | 001-015 | MDL:FMRIFTIGT:VTL | 13 | 6 | 12.25 | 3 | 0.33 |
| (1440) | (SEQ ID NO: | | | | | | | |
| | 1694) | | | | | | | |
| 1130 | ORF3A | 025-040 | PSD:FVRATATIPI:QAS | 7 | 11 | 19.68 | 4 | 0.91 |
| (1441) | (SEQ ID NO: | | | | | | | |
| | 1694) | | | | | | | |
| 1131 | ORF3A | 042-058 | PFG:WLIVGVALLAV:FQS | 1 | 13 | 24.28 | 24 | 4.23 |
| (1442) | (SEQ ID NO: | | | | | | | |
| | 1694) | | | | | | | |
| 1132 | ORF3A | 053-067 | LA:VFQSASKIIT:LKK | 6 | 13 | 26.09 | 0 | 0.00 |
| (1443) | (SEQ ID NO: | | | | | | | |
| | 1694) | | | | | | | |
| 1133 | ORF3A | 067-082 | KR:WQLALSKGVHF:VCN | 6 | 11 | 23.09 | 9 | 2.42 |
| (1444) | (SEQ ID NO: | | | | | | | |
| | 1694) | | | | | | | |
| 1134 | ORF3A | 074-106 | SKG:VHFVCNLLLLFVTV | 38 | 53 | 95.68 | 91 | 3.26 |
| (1445) | (SEQ ID NO: | | YSHLLLVAAGLEA:PFL | | | | | |
| | 1694) | | | | | | | |
| 1135 | ORF3A | 102-119 | EAP:FLYLYALVYFLQ:SIN | 24 | 18 | 34.75 | 7 | 0.84 |
| (1446) | (SEQ ID NO: | | | | | | | |
| | 1694) | | | | | | | |
| 1136 | ORF3A | 109-126 | YAL:VYFLQSINFVRI:IMR | 15 | 16 | 28.23 | 3 | 0.30 |
| (1447) | (SEQ ID NO: | | | | | | | |
| | 1694) | | | | | | | |
| 1137 | ORF3A | 115-132 | LQS:INFVRIIMRLWL:CW | 16 | 11 | 17.21 | 3 | 0.27 |
| (1448) | (SEQ ID NO: | | K | | | | | |
| | 1694) | | | | | | | |
| 1138 | ORF3A | 157-174 | CIP:YNSVTSSIVITS:GDG | 6 | 11 | 20.89 | 5 | 0.73 |
| (1449) | (SEQ ID NO: | | | | | | | |
| | 1694) | | | | | | | |
| 1139 | ORF3A | 208-223 | TSD:YYQLYSTQLS:TDT | 8 | 14 | 28.35 | 5 | 1.40 |
| (1450) | (SEQ ID NO: | | | | | | | |
| | 1694) | | | | | | | |
| 1140 | ORF6 | 013-029 | EIL:LIIMRTFKVSI:WNL | 11 | 11 | 22.01 | 1 | 0.08 |
| (1451) | (SEQ ID NO: | | | | | | | |
| | 1695) | | | | | | | |
| 1141 | ORF6 | 026-048 | IWN:LDYIINLIIKNLSKSLT: | 39 | 39 | 77.11 | 44 | 2.88 |
| (1452) | (SEQ ID NO: | | ENK | | | | | |
| | 1695) | | | | | | | |
| 1142 | ORF7A | 001-016 | MKHLFLALITLA:TCE | 12 | 17 | 31.91 | 56 | 6.52 |
| (1453) | (SEQ ID NO: | | | | | | | |
| | 1696) | | | | | | | |
| 1143 | ORF7A | 068-086 | PDG:VKHVYQLRARSVS:P | 7 | 14 | 24.13 | 10 | 1.27 |
| (1454) | (SEQ ID NO: | | KL | | | | | |
| | 1696) | | | | | | | |
| 1144 | ORF7A | 090-104 | QEE:VQELYSPIF:LIV | 10 | 5 | 8.27 | 1 | 0.80 |
| (1455) | (SEQ ID NO: | | | | | | | |
| | 1696) | | | | | | | |
| 1145 | ORF7A | 097-114 | YSP:IFLIVAAIVFIT:LCF | 12 | 23 | 41.55 | 19 | 2.09 |
| (1456) | (SEQ ID NO: | | | | | | | |
| | 1696) | | | | | | | |
| 1146 | ORF8 | 001-017 | MK:FLVFLGIITTVA:AFH | 17 | 7 | 11.16 | 9 | 1.36 |
| (1457) | (SEQ ID NO: | | | | | | | |
| | 1697) | | | | | | | |
| 1147 | ORF8 | 013-027 | VAA:FHQECSLQS:CTQ | 2 | 8 | 18.24 | 0 | 0.00 |
| (1458) | (SEQ ID NO: | | | | | | | |
| | 1697) | | | | | | | |
| 1148 | ORF8 | 042-060 | YSK:WYIRVGARKSAPL:IE | 5 | 12 | 20.81 | 3 | 0.67 |
| (1459) | (SEQ ID NO: | | L | | | | | |
| | 1697) | | | | | | | |
| 1149 | ORF10 | 001-014 | MG:YINVFAFPF:TIY | 14 | 5 | 10.1 | 2 | 1.17 |
| (1460) | (SEQ ID NO: | | | | | | | |
| | 1698) | | | | | | | |
| 1150 | ORF10 | 008-029 | AFP:FTIYSLLLCRMNSRNY | 22 | 13 | 17.72 | 14 | 1.07 |
| (1461) | (SEQ ID NO: | | :IAQ | | | | | |
| | 1668) | | | | | | | |
| 1151 | ORF1AB_ | 066-080 | EKS:YELQTPFEI:KLA | 5 | 4 | 6.37 | 1 | 0.50 |
| (1462) | NSP2 | | | | | | | |
| | (SEQ ID NO: | | | | | | | |
| | 1699) | | | | | | | |
| 1152 | ORF1AB_ | 072-088 | QTP:FEIKLAKKFDT:FNG | 7 | 10 | 18.15 | 8 | 1.10 |
| (1463) | NSP2 | | | | | | | |
| | (SEQ ID NO: | | | | | | | |
| | 1699) | | | | | | | |
| 1153 | ORF1AB_ | 083-097 | FDT:FNGECPNFV:FPL | 7 | 6 | 13.17 | 1 | 0.67 |
| (1464) | NSP2 | | | | | | | |
| | (SEQ ID NO: | | | | | | | |
| | 1699) | | | | | | | |
| 1154 | ORF1AB_ | 089-108 | ECP:NFVFPLNSIIKTIQ:PR | 9 | 12 | 18.19 | 3 | 1.33 |
| (1465) | NSP2 | | V | | | | | |
| | (SEQ ID NO: | | | | | | | |
| | 1699) | | | | | | | |
| 1155 | ORF1AB_ | 117-131 | MGR:IRSVYPVAS:PNE | 2 | 9 | 18.76 | 1 | 0.56 |
| (1466) | NSP2 | | | | | | | |
| | (SEQ ID NO: | | | | | | | |
| | 1699) | | | | | | | |
| 1156 | ORF1AB_ | 204-218 | LAE:YHNESGLKT:ILR | 5 | 5 | 10.36 | 2 | 1.60 |
| (1467) | NSP2 | | | | | | | |
| | (SEQ ID NO: | | | | | | | |
| | 1699) | | | | | | | |
| 1157 | ORF1AB_ | 268-285 | DNL:LEILQKEKVNIN:IVG | 2 | 9 | 14.52 | 10 | 1.90 |
| (1468) | NSP2 | | | | | | | |
| | (SEQ ID NO: | | | | | | | |
| | 1699) | | | | | | | |
| 1158 | ORF1AB_ | 284-300 | VGD:FKLNEEIAIIL:ASF | 5 | 8 | 12.84 | 4 | 1.13 |
| (1469) | NSP2 | | | | | | | |
| | (SEQ ID NO: | | | | | | | |
| | 1699) | | | | | | | |
| 1159 | ORF1AB_ | 290-307 | NEE:IAIILASFSASTS:AF | 9 | 16 | 28.92 | 30 | 3.29 |
| (1470) | NSP2 | | | | | | | |
| | (SEQ ID NO: | | | | | | | |
| | 1699) | | | | | | | |
| 1160 | ORF1AB_ | 298-311 | AS:FSASTSAFV:ETV | 9 | 8 | 15.81 | 6 | 0.70 |
| (1471) | NSP2 | | | | | | | |
| | (SEQ ID NO: | | | | | | | |
| | 1699) | | | | | | | |
| 1161 | ORF1AB_ | 340-361 | AWN:IGEQKSILSPLYAFA | 9 | 9 | 10.10 | 3 | 0.23 |
| (1472) | NSP2 | | S:EAA | | | | | |
| | (SEQ ID NO: | | | | | | | |
| | 1699) | | | | | | | |
| 1162 | ORF1AB_ | 361-375 | ARV:VRSIFSRTL:ETA | 5 | 7 | 15.58 | 2 | 0.75 |
| (1473) | NSP2 | | | | | | | |
| | (SEQ ID NO: | | | | | | | |
| | 1699) | | | | | | | |
| 1163 | ORF1AB_ | 376-394 | QNS:VRVLQKAAITILD:GI | 3 | 15 | 25.26 | 10 | 0.73 |
| (1474) | NSP2 | | s | | | | | |
| | (SEQ ID NO: | | | | | | | |
| | 1699) | | | | | | | |
| 1164 | ORF1AB_ | 437-452 | FGT:VYEKLKPVLD:WLE | 6 | 6 | 10.63 | 8 | 2.00 |
| (1475) | NSP2 | | | | | | | |
| | (SEQ ID NO: | | | | | | | |
| | 1699) | | | | | | | |
| 1165 | ORF1AB_ | 465-482 | GWE:IVKFISTCACEI:VGG | 7 | 9 | 15.40 | 1 | 0.20 |
| (1476) | NSP2 | | | | | | | |
| | (SEQ ID NO: | | | | | | | |
| | 1699) | | | | | | | |
| 1166 | ORF1AB_ | 495-509 | VQT:FFKLVNKFLA:LC | 10 | 15 | 37.66 | 13 | 1.59 |
| (1477) | NSP2 | | | | | | | |
| | (SEQ ID NO: | | | | | | | |
| | 1699) | | | | | | | |
| 1167 | ORF1AB_ | 500-515 | KL:VNKFLALCADSI:II | 7 | 11 | 20.46 | 5 | 0.67 |
| (1478) | NSP2 | | | | | | | |
| | (SEQ ID NO: | | | | | | | |
| | 1699) | | | | | | | |
| 1168 | ORF1AB_ | 511-531 | DSI:IIGGAKLKALNLGET:F | 8 | 9 | 10.51 | 6 | 0.60 |
| (1479) | NSP2 | | VT | | | | | |
| | (SEQ ID NO: | | | | | | | |
| | 1699) | | | | | | | |
| 1169 | ORF1AB_ | 616-630 | TEK:YCALAPNMM:VTN | 4 | 6 | 10.65 | 0 | 0.00 |
| (1480) | NSP2 | | | | | | | |
| | (SEQ ID NO: | | | | | | | |
| | 1699) | | | | | | | |
| 1170 | ORF1AB_NSP | 009-025 | DDT:VIEVQGYKSVNI:TF | 6 | 7 | 10.17 | 1 | 0.43 |
| (1481) | 3 | | | | | | | |
| | (SEQ ID NO: | | | | | | | |
| | 1700) | | | | | | | |
| 1171 | ORF1AB_NSP | 203-217 | QTI:EVNSFSGYLK:LT | 9 | 4 | 6.16 | 3 | 0.6 |
| (1482) | 3 | | | | | | | |
| | (SEQ ID NO: | | | | | | | |
| | 1700) | | | | | | | |
| 1172 | ORF1AB_NSP | 211-225 | SGY:LKLTDNVYI:KNA | 7 | 5 | 8.14 | 1 | 0.5 |
| (1483) | 3 | | | | | | | |
| | (SEQ ID NO: | | | | | | | |
| | 1700) | | | | | | | |
| 1173 | ORF1AB_NSP | 236-251 | PTV:VVNAANVYLK:HGG | 4 | 9 | 16.93 | 1 | 0.3 |
| (1484) | 3 | | | | | | | |
| | (SEQ ID NO: | | | | | | | |
| | 1700) | | | | | | | |
| 1174 | ORF1AB_NSP | 254-268 | AGA:LNKATNNAM:QVE | 2 | 7 | 15.46 | 0 | 0 |
| (1485) | 3 | | | | | | | |
| | (SEQ ID NO: | | | | | | | |
| | 1700) | | | | | | | |
| 1175 | ORF1AB_NSP | 307-324 | GED:IQLLKSAYENFN:QH | 6 | 11 | 18.73 | 4 | 0.55 |
| (1486) | 3 | | E | | | | | |
| | (SEQ ID NO: | | | | | | | |
| | 1700) | | | | | | | |
| 1176 | ORF1AB_NSP | 317-334 | NQH:EVLLAPLLSAGI:FGA | 8 | 11 | 17.99 | 81 | 13.17 |
| (1487) | 3 | | | | | | | |
| | (SEQ ID NO: | | | | | | | |
| | 1700) | | | | | | | |
| 1177 | ORF1AB_NSP | 362-376 | KNL:YDKLVSSFL:EMK | 8 | 7 | 14.87 | 3 | 0.5 |
| (1488) | 3 | | | | | | | |
| | (SEQ ID NO: | | | | | | | |
| | 1700) | | | | | | | |
| 1178 | ORF1AB_NSP | 369-383 | VSS:FLEMKSEKQ:VEQ | 5 | 8 | 17.97 | 9 | 2.22 |
| (1489) | 3 | | | | | | | |
| | (SEQ ID NO: | | | | | | | |
| | 1700) | | | | | | | |
| 1179 | ORF1AB_NSP | 427-442 | ETK:FLTENLLLYI:DIN | 13 | 4 | 6.31 | 15 | 3.14 |
| (1490) | 3 | | | | | | | |
| | (SEQ ID NO: | | | | | | | |
| | 1700) | | | | | | | |
| 1180 | ORF1AB_NSP | 432-452 | TEN:LLLYIDINGNLHPDS: | 10 | 11 | 14.83 | 3 | 0.64 |
| (1491) | 3 | | ATL | | | | | |
| | (SEQ ID NO: | | | | | | | |
| | 1700) | | | | | | | |
| 1181 | ORF1AB_NSP | 457-472 | DIT:FLKKDAPYIV:GDV | 5 | 6 | 10.03 | 2 | 0.29 |
| (1492) | 3 | | | | | | | |
| | (SEQ ID NO: | | | | | | | |
| | 1700) | | | | | | | |
| 1182 | ORF1AB_NSP | 524-539 | AKT:VLKKCKSAFY:ILP | 5 | 8 | 14.57 | 11 | 2 |
| (1493) | 3 | | | | | | | |
| | (SEQ ID NO: | | | | | | | |
| | 1700) | | | | | | | |
| 1183 | ORF1AB_NSP | 532-546 | KSA:FYILPSIIS:NEK | 10 | 8 | 17.75 | 0 | 0 |
| (1494) | 3 | | | | | | | |
| | (SEQ ID NO: | | | | | | | |
| | 1700) | | | | | | | |
| 1184 | ORF1AB_NSP | 601-618 | GAR:FYFYTSKTTVAS:LIN | 12 | 14 | 24.21 | 6 | 0.73 |
| (1495) | 3 | | | | | | | |
| | (SEQ ID NO: | | | | | | | |
| | 1700) | | | | | | | |
| 1185 | ORF1AB_NSP | 642-659 | EEA:ARYMRSLKVPAT:VS | 9 | 15 | 28.80 | 5 | 0.38 |
| (1496) | 3 | | V | | | | | |
| | (SEQ ID NO: | | | | | | | |
| | 1700) | | | | | | | |
| 1186 | ORF1AB_NSP | 665-683 | VTA:YNGYLTSSSKTPE:EH | 10 | 11 | 19.02 | 12 | 1.5 |
| (1497) | 3 | | F | | | | | |
| | (SEQ ID NO: | | | | | | | |
| | 1700) | | | | | | | |
| 1187 | ORF1AB_NSP | 680-698 | EEH:FIETISLAGSYKD:WS | 10 | 11 | 17.23 | 9 | 1.09 |
| (1498) | 3 | | Y | | | | | |
| | (SEQ ID NO: | | | | | | | |
| | 1700) | | | | | | | |
| 1188 | ORF1AB_NSP | 732-751 | VIT:FDNLKTLLSLREVR:TI | 9 | 16 | 29.14 | 21 | 1.95 |
| (1499) | 3 | | K | | | | | |
| | (SEQ ID NO: | | | | | | | |
| | 1700) | | | | | | | |
| 1189 | ORF1AB_NSP | 742-755 | LS:LREVRTIKV:FTT | 7 | 6 | 11.09 | 0 | 0 |
| (1500) | 3 | | | | | | | |
| | (SEQ ID NO: | | | | | | | |
| | 1700) | | | | | | | |
| 1190 | ORF1AB_NSP | 783-800 | GAD:VTKIKPHNSHEG:KT | 2 | 8 | 11.79 | 1 | 0.13 |
| (1501) | 3 | | F | | | | | |
| | (SEQ ID NO: | | | | | | | |
| | 1700) | | | | | | | |
| 1191 | ORF1AB_NSP | 822-839 | PSF:LGRYMSALNHTK:K | 18 | 9 | 13.90 | 2 | 0.33 |
| (1502) | 3 | | WK | | | | | |
| | (SEQ ID NO: | | | | | | | |
| | 1700) | | | | | | | |
| 1192 | ORF1AB_NSP | 865-881 | LQQ:IELKFNPPALQ:DAY | 2 | 10 | 15.40 | 4 | 0.9 |
| (1503) | 3 | | | | | | | |
| | (SEQ ID NO: | | | | | | | |
| | 1700) | | | | | | | |
| 1193 | ORF1AB_NSP | 878-892 | QDA:YYRARAGEA:ANF | 0 | 8 | 14.97 | 3 | 0.44 |
| (1504) | 3 | | | | | | | |
| | (SEQ ID NO: | | | | | | | |
| | 1700) | | | | | | | |
| 1194 | ORF1AB_NSP | 892-907 | FCA:LILAYCNKTV:GEL | 8 | 8 | 15.65 | 2 | 0.2 |
| (1505) | 3 | | | | | | | |
| | (SEQ ID NO: | | | | | | | |
| | 1700) | | | | | | | |
| 1195 | ORF1AB_NSP | 907-922 | TMS:YLFQHANLDS:CKR | 7 | 10 | 19.45 | 5 | 2 |
| (1506) | 3 | | | | | | | |
| | (SEQ ID NO: | | | | | | | |
| | 1700) | | | | | | | |
| 1196 | ORF1AB_NSP | 947-963 | VEA:VMYMGTLSYEQ:FK | 18 | 8 | 12.44 | 1 | 0.13 |
| (1507) | 3 | | K | | | | | |
| | (SEQ ID NO: | | | | | | | |
| | 1700) | | | | | | | |
| 1197 | ORF1AB_NSP | 976-999 | TKY:LVQQESPFVM | 18 | 19 | 31.56 | 4 | 0.25 |
| (1508) | 3 | | MSAPPAQY:ELK | | | | | |
| | (SEQ ID NO: | | | | | | | |
| | 1700) | | | | | | | |
| 1198 | ORF1AB_NSP | 1015-1029 | CGH:YKHITSKET:LYC | 7 | 6 | 13.49 | 1 | 0.17 |
| (1509) | 3 | | | | | | | |
| | (SEQ ID NO: | | | | | | | |
| | 1700) | | | | | | | |
| 1199 | ORF1AB_NSP | 1046-1060 | TDV:FYKENSYTT:TIK | 9 | 6 | 11.90 | 2 | 0.29 |
| (1510) | 3 | | | | | | | |
| | (SEQ ID NO: | | | | | | | |
| | 1700) | | | | | | | |
| 1200 | ORF1AB_NSP | 1078-1094 | LDN:YYKKDNSYFTE:QPI | 6 | 8 | 14.43 | 1 | 0.38 |
| (1511) | 3 | | | | | | | |
| | (SEQ ID NO: | | | | | | | |
| | 1700) | | | | | | | |
| 1201 | ORF1AB_NSP | 1120-1140 | ADD:LNQLTGYKKPASREL | 8 | 13 | 19.75 | 3 | 0.62 |
| (1512) | 3 | | :KVT | | | | | |
| | (SEQ ID NO: | | | | | | | |
| | 1700) | | | | | | | |
| 1202 | ORF1AB_NSP | 1151-1167 | AID:YKHYTPSFKKGA:KL | 13 | 5 | 6.73 | 0 | 0 |
| (1513) | 3 | | | | | | | |
| | (SEQ ID NO: | | | | | | | |
| | 1700) | | | | | | | |
| 1203 | ORF1AB_NSP | 1169-1187 | HKP:IVWHVNNATNKAT: | 4 | 13 | 21.58 | 3 | 0.46 |
| (1514) | 3 | | YKP | | | | | |
| | (SEQ ID NO: | | | | | | | |
| | 1700) | | | | | | | |
| 1204 | ORF1AB_NSP | 1254-1270 | VGD:IILKPANNSLK:ITE | 7 | 18 | 33.29 | 10 | 2 |
| (1515) | 3 | | | | | | | |
| | (SEQ ID NO: | | | | | | | |
| | 1700) | | | | | | | |
| 1205 | ORF1AB_NSP | 1292-1308 | PNE:LSRVLGLKTLAT:HG | 2 | 12 | 21.59 | 23 | 3 |
| (1516) | 3 | | | | | | | |
| | (SEQ ID NO: | | | | | | | |
| | 1700) | | | | | | | |
| 1206 | ORF1AB_NSP | 1299-1312 | LG:LKTLATHGL:AAV | 6 | 4 | 7.29 | 2 | 0.33 |
| (1517) | 3 | | | | | | | |
| | (SEQ ID NO: | | | | | | | |
| | 1700) | | | | | | | |
| 1207 | ORF1AB_NSP | 1324-1342 | AKP:FLNKVVSTTTNIV:TR | 6 | 13 | 21.73 | 1 | 0.23 |
| (1518) | 3 | | C | | | | | |
| | (SEQ ID NO: | | | | | | | |
| | 1700) | | | | | | | |
| 1208 | ORF1AB_NSP | 1340-1354 | TRC:LNRVCTNYM:PYF | 10 | 8 | 15.30 | 0 | 0 |
| (1519) | 3 | | | | | | | |
| | (SEQ ID NO: | | | | | | | |
| | 1700) | | | | | | | |
| 1209 | ORF1AB_NSP | 1350-1369 | YMP:YFFTLLLQLCTFTR:ST | 23 | 18 | 28.49 | 18 | 2.15 |
| (1520) | 3 | | N | | | | | |
| | (SEQ ID NO: | | | | | | | |
| | 1700) | | | | | | | |
| 1210 | ORF1AB_NSP | 1361-1375 | LCT:FTRSTNSRI:KAS | 6 | 9 | 21.21 | 3 | 1.33 |
| (1521) | 3 | | | | | | | |
| | (SEQ ID NO: | | | | | | | |
| | 1700) | | | | | | | |
| 1211 | ORF1AB_NSP | 1369-1383 | NSR:IKASMPTTI:AKN | 5 | 6 | 13.33 | 0 | 0 |
| (1522) | 3 | | | | | | | |
| | (SEQ ID NO: | | | | | | | |
| | 1700) | | | | | | | |
| 1212 | ORF1AB_NSP | 1390-1411 | KFC:LEASFNYLKSPNFSKL: | 19 | 19 | 31.36 | 9 | 1.1 |
| (1523) | 3 | | INI | | | | | |
| | (SEQ ID NO: | | | | | | | |
| | 1700) | | | | | | | |
| 1213 | ORF1AB_NSP | 1402-1416 | SPN:FSKLINIII:WFL | 12 | 9 | 19.04 | 4 | 0.36 |
| (1524) | 3 | | | | | | | |
| | (SEQ ID NO: | | | | | | | |
| | 1700) | | | | | | | |
| 1214 | ORF1AB_NSP | 1408-1428 | LIN:IIIWFLLLSVCLGSL:IYS | 32 | 27 | 54.71 | 65 | 6.13 |
| (1525) | 3 | | | | | | | |
| | (SEQ ID NO: | | | | | | | |
| | 1700) | | | | | | | |
| 1215 | ORF1AB_NSP | 1422-1446 | LGS:LIYSTAALGVL | 17 | 26 | 41.14 | 8 | 0.69 |
| (1526) | 3 | | MSNLGMPS:YCT | | | | | |
| | (SEQ ID NO: | | | | | | | |
| | 1700) | | | | | | | |
| 1216 | ORF1AB_NSP | 1449-1464 | REG:YLNSTNVTIA:TYC | 10 | 9 | 18.54 | 3 | 0.89 |
| (1527) | 3 | | | | | | | |
| | (SEQ ID NO: | | | | | | | |
| | 1700) | | | | | | | |
| 1217 | ORF1AB_NSP | 1493-1507 | ISS:FKWDLTAFG:LVA | 7 | 5 | 10.55 | 1 | 0.17 |
| (1528) | 3 | | | | | | | |
| | (SEQ ID NO: | | | | | | | |
| | 1700) | | | | | | | |
| 1218 | ORF1AB_NSP | 1510-1526 | FLA:YILFTRFFYVL:GLA | 21 | 5 | 7.26 | 3 | 0.29 |
| (1529) | 3 | | | | | | | |
| | (SEQ ID NO: | | | | | | | |
| | 1700) | | | | | | | |
| 1219 | ORF1AB_NSP | 1517-1533 | TR:FFYVLGLAAIMQ:LFF | 11 | 19 | 34.54 | 17 | 1.6 |
| (1530) | 3 | | | | | | | |
| | (SEQ ID NO: | | | | | | | |
| | 1700) | | | | | | | |
| 1220 | ORF1AB_NSP | 1526-1544 | AAI:MQLFFSYFAVHFI:SN | 23 | 12 | 20.44 | 1 | 0.08 |
| (1531) | 3 | | S | | | | | |
| | (SEQ ID NO: | | | | | | | |
| | 1700) | | | | | | | |
| 1221 | ORF1AB_NSP | 1535-1551 | YFA:VHFISNSWLMW:LII | 24 | 8 | 14.00 | 0 | 0 |
| (1532) | 3 | | | | | | | |
| | (SEQ ID NO: | | | | | | | |
| | 1700) | | | | | | | |
| 1222 | ORF1AB_NSP | 1543-1565 | NSW:LMWLIINLV | 22 | 23 | 37.35 | 6 | 0.56 |
| (1533) | 3 | | QMAPISAM:VRM | | | | | |
| | (SEQ ID NO: | | | | | | | |
| | 1700) | | | | | | | |
| 1223 | ORF1AB_NSP | 1556-1579 | MAP:ISAMVRMY | 48 | 16 | 22.07 | 2 | 0.25 |
| (1534) | 3 | | IFFASFYYVW:KSY | | | | | |
| | (SEQ ID NO: | | | | | | | |
| | 1700) | | | | | | | |
| 1224 | ORF1AB_NSP | 1569-1587 | FAS:FYYVWKSYVHVVD: | 16 | 9 | 13.35 | 0 | 0 |
| (1535) | 3 | | GCN | | | | | |
| | (SEQ ID NO: | | | | | | | |
| | 1700) | | | | | | | |
| 1225 | ORF1AB_NSP | 1592-1606 | MMC:YKRNRATRV:ECT | 2 | 9 | 20.01 | 2 | 0.33 |
| (1536) | 3 | | | | | | | |
| | (SEQ ID NO: | | | | | | | |
| | 1700) | | | | | | | |
| 1226 | ORF1AB_NSP | 1606-1624 | TTI:VNGVRRSFYVYAN:G | 8 | 4 | 4.21 | 4 | 1 |
| (1537) | 3 | | GK | | | | | |
| | (SEQ ID NO: | | | | | | | |
| | 1700) | | | | | | | |
| 1227 | ORF1AB_NSP | 1614-1628 | RSF:YVYANGGKG:FCK | 4 | 6 | 11.79 | 1 | 0.17 |
| (1538) | 3 | | | | | | | |
| | (SEQ ID NO: | | | | | | | |
| | 1700) | | | | | | | |
| 1228 | ORF1AB_NSP | 1648-1670 | SDE:VARDLSLQFKRPINP | 7 | 10 | 12.12 | 5 | 0.6 |
| (1539) | 3 | | TD:QSS | | | | | |
| | (SEQ ID NO: | | | | | | | |
| | 1700) | | | | | | | |
| 1229 | ORF1AB_NSP | 1700-1720 | LSH:FVNLDNLRANNTKG | 3 | 23 | 39.96 | 3 | 0.21 |
| (1540) | 3 | | S:LPI | | | | | |
| | (SEQ ID NO: | | | | | | | |
| | 1700) | | | | | | | |
| 1230 | ORF1AB_NSP | 1743-1757 | QPI:LLLDQALVS:DVG | 5 | 4 | 8.56 | 23 | 6.86 |
| (1541) | 3 | | | | | | | |
| | (SEQ ID NO: | | | | | | | |
| | 1700) | | | | | | | |
| 1231 | ORF1AB_NSP | 1770-1791 | VKM:FDAYVNTFS | 22 | 13 | 19.73 | 1 | 0.07 |
| (1542) | 3 | | STFNVPM:EKL | | | | | |
| | (SEQ ID NO: | | | | | | | |
| | 1700) | | | | | | | |
| 1232 | ORF1AB_NSP | 1805-1819 | LST:FISAARQGF:VDS | 3 | 5 | 10.54 | 4 | 1 |
| (1543) | 3 | | | | | | | |
| | (SEQ ID NO: | | | | | | | |
| | 1700) | | | | | | | |
| 1233 | ORF1AB_NSP | 1878-1896 | ARH:INAQVAKSHNIAL:I | 3 | 11 | 17.01 | 3 | 0.23 |
| (1544) | 3 | | WN | | | | | |
| | (SEQ ID NO: | | | | | | | |
| | 1700) | | | | | | | |
| 1234 | ORF1AB_NSP | 1904-1923 | SEQ:LRKQIRSAAKKNNL: | 7 | 14 | 23.21 | 4 | 0.29 |
| (1555) | 3 | | PFK | | | | | |
| | (SEQ ID NO: | | | | | | | |
| | 1700) | | | | | | | |
| 1235 | ORF1AB_NSP | 1919-1933 | NLP:FKLTCATTR:QVV | 8 | 8 | 15.93 | 0 | 0 |
| (1546) | 3 | | | | | | | |
| | (SEQ ID NO: | | | | | | | |
| | 1700) | | | | | | | |
| 1236 | ORF1AB_NSP | 1929-1945 | TRQ:VVNVVTTKIALKG:G | 5 | 8 | 11.23 | 3 | 0.88 |
| (1547) | 3 | | | | | | | |
| | (SEQ ID NO: | | | | | | | |
| | 1700) | | | | | | | |
| 1237 | ORF1AB_NSP | 1-30 | KI:VNNWLKQLIKV | 32 | 49 | 81.67 | 28 | 0.96 |
| (1548) | 4 | | TLVFLFVAAIFYLI:TPV | | | | | |
| | (SEQ ID NO: | | | | | | | |
| | 1701) | | | | | | | |
| 1238 | ORF1AB_NSP | 20-36 | VAA:IFYLITPVHVM:SKH | 10 | 10 | 18.37 | 1 | 0.18 |
| (1549) | 4 | | | | | | | |
| | (SEQ ID NO: | | | | | | | |
| | 1701) | | | | | | | |
| 1239 | ORF1AB_NSP | 115-137 | NGD:FLHFLPRVFSAVGNI | 11 | 18 | 28.25 | 5 | 0.67 |
| (1550) | 4 | | CY:TPS | | | | | |
| | (SEQ ID NO: | | | | | | | |
| | 1701) | | | | | | | |
| 1240 | ORF1AB_NSP | 188-203 | DTR:YVLMDGSIIQ:FPN | 9 | 7 | 13.38 | 4 | 0.57 |
| (1551) | 4 | | | | | | | |
| | (SEQ ID NO: | | | | | | | |
| | 1701) | | | | | | | |
| 1241 | ORF1AB_NSP | 195-210 | DGS:IIQFPNTYLE:GSV | 9 | 6 | 9.83 | 1 | 0.33 |
| (1552) | 4 | | | | | | | |
| | (SEQ ID NO: | | | | | | | |
| | 1701) | | | | | | | |
| 1242 | ORF1AB_NSP | 238-259 | SGR:WVLNNDYYRSLPGV | 11 | 13 | 19.79 | 3 | 0.38 |
| (1553) | 4 | | FC:GVD | | | | | |
| | (SEQ ID NO: | | | | | | | |
| | 1701) | | | | | | | |
| 1243 | ORF1AB_NSP | 258-279 | VDA:VNLLTNMFTPLIQPI | 19 | 18 | 30.45 | 0 | 0 |
| (1554) | 4 | | G:ALD | | | | | |
| | (SEQ ID NO: | | | | | | | |
| | 1701) | | | | | | | |
| 1244 | ORF1AB_NSP | 296-311 | CLA:YYFMRFRRAFG:EY | 11 | 9 | 18.69 | 3 | 0.44 |
| (1555) | 4 | | | | | | | |
| | (SEQ ID NO: | | | | | | | |
| | 1701) | | | | | | | |
| 1245 | ORF1AB_NSP | 302-315 | MR:FRRAFGEYS:HVV | 0 | 8 | 16.53 | 4 | 1.75 |
| (1556) | 4 | | | | | | | |
| | (SEQ ID NO: | | | | | | | |
| | 1701) | | | | | | | |
| 1246 | ORF1AB_NSP | 315-334 | VA:FNTLLFLMSFTVLCL:T | 30 | 20 | 36.58 | 2 | 0.18 |
| (1557) | 4 | | PV | | | | | |
| | (SEQ ID NO: | | | | | | | |
| | 1701) | | | | | | | |
| 1247 | ORF1AB_NSP | 338-364 | LPG:VYSVIYLYLTF | 43 | 23 | 30.57 | 3 | 0.22 |
| (1558) | 4 | | YLTNDVSFLA:HIQ | | | | | |
| | (SEQ ID NO: | | | | | | | |
| | 1701) | | | | | | | |
| 1248 | ORF1AB_NSP | 362-380 | HIQ:WMVMFTPLVPFWI: | 28 | 11 | 19.08 | 0 | 0 |
| (1559) | 4 | | TIA | | | | | |
| | (SEQ ID NO: | | | | | | | |
| | 1701) | | | | | | | |
| 1249 | ORF1AB_NSP | 372-386 | LVP:FWITIAYII:CIS | 15 | 6 | 11.53 | 1 | 0.11 |
| (1560) | 4 | | | | | | | |
| | (SEQ ID NO: | | | | | | | |
| | 1701) | | | | | | | |
| 1250 | ORF1AB_NSP | 387-405 | TKH:FYWFFSNYLKRRV:V | 22 | 22 | 41.58 | 6 | 0.38 |
| (1561) | 4 | | FN | | | | | |
| | (SEQ ID NO: | | | | | | | |
| | 1701) | | | | | | | |
| 1251 | ORF1AB_NSP | 394-415 | FSN:YLKRRVVFNGVSFST | 13 | 11 | 13.16 | 13 | 1.13 |
| (1562) | 4 | | F:EEA | | | | | |
| | (SEQ ID NO: | | | | | | | |
| | 1701) | | | | | | | |
| 1252 | ORF1AB_NSP | 417-433 | LCT:FLLNKEMYLKL:RSD | 10 | 8 | 13.04 | 2 | 0.33 |
| (1563) | 4 | | | | | | | |
| | (SEQ ID NO: | | | | | | | |
| | 1701) | | | | | | | |
| 1253 | ORF1AB_NSP | 424-441 | KEM:YLKLRSDVLLPL:TQY | 12 | 11 | 20.85 | 16 | 1.85 |
| (1564) | 4 | | | | | | | |
| | (SEQ ID NO: | | | | | | | |
| | 1701) | | | | | | | |
| 1254 | ORF1AB_NSP | 435-458 | LLP:LTQYNRYLAL | 21 | 22 | 37.02 | 4 | 0.3 |
| (1565) | 4 | | YNKYKYFS:GAM | | | | | |
| | (SEQ ID NO: | | | | | | | |
| | 1701) | | | | | | | |
| 1255 | ORF1AB_3 | 054-072 | YED:LLIRKSNHNFLVQ:AG | 6 | 18 | 35.29 | 1 | 0.05 |
| (1566) | C-LIKE_ | | N | | | | | |
| | PROTEINASE | | | | | | | |
| | (SEQ ID NO: | | | | | | | |
| | 1702) | | | | | | | |
| 1256 | ORF1AB_3 | 063-078 | NHN:FLVQAGNVQL:RVI | 3 | 11 | 20.58 | 7 | 1.08 |
| (1567) | C-LIKE_ | | | | | | | |
| | PROTEINASE | | | | | | | |
| | (SEQ ID NO: | | | | | | | |
| | 1702) | | | | | | | |
| 1257 | ORF1AB_3 | 098-114 | TPK:YKFVRIQPGQT:FSV | 7 | 11 | 19.63 | 1 | 0.25 |
| (1568) | C-LIKE_ | | | | | | | |
| | PROTEINASE | | | | | | | |
| | (SEQ ID NO: | | | | | | | |
| | 1702) | | | | | | | |
| 1258 | ORF1AB_3 | 123-147 | SGV:YQCAMRPN | 13 | 17 | 23.50 | 2 | 0.18 |
| (1569) | C-LIKE_ | | FTIKGSFLNGS:CGS | | | | | |
| | PROTEINASE | | | | | | | |
| | (SEQ ID NO: | | | | | | | |
| | 1702) | | | | | | | |
| 1259 | ORF1AB_3 | 216-231 | DRW:FLNRFTTTLN:DFN | 12 | 9 | 15.74 | 4 | 0.89 |
| (1570) | C-LIKE_ | | | | | | | |
| | PROTEINASE | | | | | | | |
| | (SEQ ID NO: | | | | | | | |
| | 1702) | | | | | | | |
| 1260 | ORF1AB_NSP | 4-30 | KRT:IKGTHHWLLL | 27 | 39 | 71.82 | 85 | 6.41 |
| (1571) | 6 | | TILTSLLVLVQ:STQ | | | | | |
| | (SEQ ID NO: | | | | | | | |
| | 1703) | | | | | | | |
| 1261 | ORF1AB_NSP | 31-49 | WSL:FFFLYENAFLPFA:M | 18 | 17 | 29.44 | 1 | 0.06 |
| (1572) | 6 | | GI | | | | | |
| | (SEQ ID NO: | | | | | | | |
| | 1703) | | | | | | | |
| 1262 | ORF1AB_NSP | 46-66 | AMG:IIAMSAFA | 24 | 9 | 11.39 | 0 | 0 |
| (1573) | 6 | | MMFVKHK:HAF | | | | | |
| | (SEQ ID NO: | | | | | | | |
| | 1703) | | | | | | | |
| 1263 | ORF1AB_NSP | 56-70 | AMM:FVKHKHAFL:CLF | 14 | 4 | 8.09 | 4 | 0.71 |
| (1574) | 6 | | | | | | | |
| | (SEQ ID NO: | | | | | | | |
| | 1703) | | | | | | | |
| 1264 | ORF1AB_NSP | 63-82 | KHA:FLCLFLLPSLATVA:YF | 19 | 20 | 37.07 | 29 | 1.9 |
| (1575) | 6 | | N | | | | | |
| | (SEQ ID NO: | | | | | | | |
| | 1703) | | | | | | | |
| 1265 | ORF1AB_NSP | 77-94 | TVA:YFNMVYMPASWV: | 23 | 9 | 13.05 | 1 | 0.22 |
| (1576) | 6 | | MRI | | | | | |
| | (SEQ ID NO: | | | | | | | |
| | 1703) | | | | | | | |
| 1266 | ORF1AB_NSP | 111-127 | KDC:VMYASAVVLLI:LMT | 12 | 18 | 34.15 | 26 | 2.44 |
| (1577) | 6 | | | | | | | |
| | (SEQ ID NO: | | | | | | | |
| | 1703) | | | | | | | |
| 1267 | ORF1AB_NSP | 119-134 | AVV:LLILMTARTV:YDD | 13 | 12 | 25.21 | 5 | 0.35 |
| (1578) | 6 | | | | | | | |
| | (SEQ ID NO: | | | | | | | |
| | 1703) | | | | | | | |
| 1268 | ORF1AB_NSP | 136-157 | ARR:VWTLMNVLT | 25 | 17 | 31.10 | 7 | 0.94 |
| (1579) | 6 | | LVYKVYY:GNA | | | | | |
| | (SEQ ID NO: | | | | | | | |
| | 1703) | | | | | | | |
| 1269 | ORF1AB_NSP | 147-161 | TLV:YKVYYGNAL:DQA | 4 | 5 | 10.01 | 0 | 0 |
| (1580) | 6 | | | | | | | |
| | (SEQ ID NO: | | | | | | | |
| | 1703) | | | | | | | |
| 1270 | ORF1AB_NSP | 162-182 | ISM:WALIISVTSNYSGVV: | 16 | 22 | 41.16 | 3 | 0.18 |
| (1581) | 6 | | TTV | | | | | |
| | (SEQ ID NO: | | | | | | | |
| | 1703) | | | | | | | |
| 1271 | ORF1AB_NSP | 196-211 | YCP:IFFITGNTLQ:CIM | 6 | 11 | 19.96 | 0 | 0 |
| (1582) | 6 | | | | | | | |
| | (SEQ ID NO: | | | | | | | |
| | 1703) | | | | | | | |
| 1272 | ORF1AB_NSP | 221-246 | CTC:YFGLFCLLNRYF | 33 | 23 | 36.55 | 7 | 0.61 |
| (1583) | 6 | | RLTLGVYD:YLV | | | | | |
| | (SEQ ID NO: | | | | | | | |
| | 1703) | | | | | | | |
| 1273 | ORF1AB_NSP | 248-264 | TQE:FRYMNSQGLLP:PKN | 5 | 13 | 29.32 | 3 | 0.64 |
| (1584) | 6 | | | | | | | |
| | (SEQ ID NO: | | | | | | | |
| | 1703) | | | | | | | |
| 1274 | ORF1AB_NSP | 266-284 | IDA:FKLNIKLLGVGGK:PCI | 5 | 13 | 27.78 | 15 | 3.2 |
| (1585) | 6 | | | | | | | |
| | (SEQ ID NO: | | | | | | | |
| | 1703) | | | | | | | |
| 1275 | ORF1AB_NSP | 8-33 | CTS:VVLLSVLQQLR | 11 | 33 | 56.25 | 54 | 3.09 |
| (1586) | 7 | | VESSSKLWA:QCV | | | | | |
| | (SEQ ID NO: | | | | | | | |
| | 1704) | | | | | | | |
| 1276 | ORF1AB_NSP | 46-70 | TEA:FEKMVSLLSV | 17 | 39 | 78.38 | 118 | 7.00 |
| (1587) | 7 | | LLSMQGAVD:INK | | | | | |
| | (SEQ ID NO: | | | | | | | |
| | 1704) | | | | | | | |
| 1277 | ORF1AB_NSP | 003-017 | ASE:FSSLPSYAA:FAT | 10 | 7 | 14.84 | 3 | 0.38 |
| (1588) | 8 | | | | | | | |
| | (SEQ ID NO: | | | | | | | |
| | 1705) | | | | | | | |
| 1278 | ORF1AB_NSP | 030-050 | DSE:VVLKKLKKSLNVAKS: | 5 | 28 | 53.65 | 51 | 4 |
| (1589) | 8 | | EFD | | | | | |
| | (SEQ ID NO: | | | | | | | |
| | 1705) | | | | | | | |
| 1279 | ORF1AB_NSP | 064-082 | DQA:MTQMYKQARSEDK | 3 | 9 | 12.98 | 2 | 0.22 |
| (1590) | 8 | | :RAK | | | | | |
| | (SEQ ID NO: | | | | | | | |
| | 1705) | | | | | | | |
| 1280 | ORF1AB_NSP | 089-103 | TML:FTMLRKLDN:DAL | 8 | 5 | 10.14 | 4 | 1.71 |
| (1591) | 8 | | | | | | | |
| | (SEQ ID NO: | | | | | | | |
| | 1705) | | | | | | | |
| 1281 | ORF1AB_NSP | 100-118 | NDA:LNNIINNARDGCV:P | 3 | 8 | 11.35 | 4 | 0.63 |
| (1592) | 8 | | LN | | | | | |
| | (SEQ ID NO: | | | | | | | |
| | 1705) | | | | | | | |
| 1282 | ORF1AB_NSP | 116-133 | PLN:IIPLTTAAKLMV:VIP | 9 | 7 | 10.25 | 2 | 0.57 |
| (1593) | 8 | | | | | | | |
| | (SEQ ID NO: | | | | | | | |
| | 1705) | | | | | | | |
| 1283 | ORF1AB_NSP | 182-198 | WPL:IVTALRANSAVKL:Q | 4 | 20 | 39.66 | 10 | 0.95 |
| (1594) | 8 | | | | | | | |
| | (SEQ ID NO: | | | | | | | |
| | 1705) | | | | | | | |
| 1284 | ORF1AB_NSP | 035-052 | TKG:GRFVLALLSDLQ:DLK | 5 | 14 | 25.78 | 18 | 2.21 |
| (1595) | 9 | | | | | | | |
| | (SEQ ID NO: | | | | | | | |
| | 1706) | | | | | | | |
| 1285 | ORF1AB_NSP | 084-097 | KVK:YLYFIKGLN:NL | 6 | 4 | 8.18 | 1 | 0.20 |
| (1596) | 9 | | | | | | | |
| | (SEQ ID NO: | | | | | | | |
| | 1706) | | | | | | | |
| 1286 | ORF1AB_NSP | 088-101 | LY:FIKGLNNLNR:GM | 3 | 16 | 34.47 | 9 | 1.90 |
| (1597) | 9 | | | | | | | |
| | (SEQ ID NO: | | | | | | | |
| | 1706) | | | | | | | |
| 1287 | ORF1AB_NSP | 092-108 | KG:LNNLNRGMVLGS:LA | 2 | 8 | 12.57 | 1 | 0.13 |
| (1598) | 9 | | A | | | | | |
| | (SEQ ID NO: | | | | | | | |
| | 1706) | | | | | | | |
| 1288 | ORF1AB_NSP | 099-113 | RGM:VLGSLAATV:RLQ | 5 | 6 | 11.10 | 7 | 3.00 |
| (1599) | 9 | | | | | | | |
| | (SEQ ID NO: | | | | | | | |
| | 1706) | | | | | | | |
| 1289 | ORF1AB_NSP | 039-053 | TNC:VKMLCTHTG:TGQ | 5 | 6 | 11.8 | 0 | 0.00 |
| (1600) | 10 | | | | | | | |
| | (SEQ ID NO: | | | | | | | |
| | 1707) | | | | | | | |
| 1290 | ORF1AB_RNA- | 066-084 | IDS:YFVVKRHTFSNYQ:HE | 7 | 11 | 16.70 | 1 | 0.08 |
| (1601) | DEPENDENT_ | | E | | | | | |
| | RNA_ | | | | | | | |
| | POLYMERASE | | | | | | | |
| | (SEQ ID NO: | | | | | | | |
| | 1708) | | | | | | | |
| 1291 | ORF1AB_RNA- | 084-100 | ETI:YNLLKDCPAVA:KHD | 5 | 7 | 11.45 | 2 | 0.57 |
| (1602) | DEPENDENT_ | | | | | | | |
| | RNA_ | | | | | | | |
| | POLYMERASE | | | | | | | |
| | (SEQ ID NO: | | | | | | | |
| | 1708) | | | | | | | |
| 1292 | ORF1AB_RNA- | 168-183 | NPD:ILRVYANLGE:RVR | 3 | 11 | 23.92 | 10 | 2.25 |
| (1603) | DEPENDENT_ | | | | | | | |
| | RNA_ | | | | | | | |
| | POLYMERASE | | | | | | | |
| | (SEQ ID NO: | | | | | | | |
| | 1708) | | | | | | | |
| 1293 | ORF1AB_RNA- | 234-251 | VDS:YYSLLMPILTLTR:AL | 21 | 12 | 20.48 | 4 | 0.4 |
| (1604) | DEPENDENT_ | | | | | | | |
| | RNA_ | | | | | | | |
| | POLYMERASE | | | | | | | |
| | (SEQ ID NO: | | | | | | | |
| | 1708) | | | | | | | |
| 1294 | ORF1AB_RNA- | 242-258 | MP:ILTLTRALTAES:HVD | 4 | 15 | 28.61 | 17 | 2.47 |
| (1605) | DEPENDENT_ | | | | | | | |
| | RNA_ | | | | | | | |
| | POLYMERASE | | | | | | | |
| | (SEQ ID NO: | | | | | | | |
| | 1708) | | | | | | | |
| 1295 | ORF1AB_RNA- | 291-305 | DQT:YHPNCVNCL:DDR | 4 | 6 | 11.92 | 0 | 0 |
| (1606) | DEPENDENT_ | | | | | | | |
| | RNA_ | | | | | | | |
| | POLYMERASE | | | | | | | |
| | (SEQ ID NO: | | | | | | | |
| | 1708) | | | | | | | |
| 1296 | ORF1AB_RNA- | 305-328 | RCI:LHCANFNVL | 23 | 12 | 14.65 | 1 | 0.08 |
| (1607) | DEPENDENT_ | | FSTVFPPTS:FGP | | | | | |
| | RNA_ | | | | | | | |
| | POLYMERASE | | | | | | | |
| | (SEQ ID NO: | | | | | | | |
| | 1708) | | | | | | | |
| 1297 | ORF1AB_RNA- | 355-371 | HNQ:DVNLHSSRLSFK:EL | 7 | 11 | 17.69 | 9 | 2 |
| (1608) | DEPENDENT_ | | | | | | | |
| | RNA_ | | | | | | | |
| | POLYMERASE | | | | | | | |
| | (SEQ ID NO: | | | | | | | |
| | 1708) | | | | | | | |
| 1298 | ORF1AB_RNA- | 366-379 | LS:FKELLVYAA:DPA | 3 | 6 | 12.69 | 1 | 0.14 |
| (1609) | DEPENDENT_ | | | | | | | |
| | RNA_ | | | | | | | |
| | POLYMERASE | | | | | | | |
| | (SEQ ID NO: | | | | | | | |
| | 1708) | | | | | | | |
| 1299 | ORF1AB_RNA- | 377-391 | DPA:MHAASGNLL:LDK | 10 | 6 | 14.08 | 2 | 1.17 |
| (1610) | DEPENDENT_ | | | | | | | |
| | RNA_ | | | | | | | |
| | POLYMERASE | | | | | | | |
| | (SEQ ID NO: | | | | | | | |
| | 1708) | | | | | | | |
| 1300 | ORF1AB_RNA- | 539-559 | ITQ:MNLKYAISAKNRART | 5 | 15 | 25.08 | 5 | 0.41 |
| (1611) | DEPENDENT_ | | :VAG | | | | | |
| | RNA_ | | | | | | | |
| | POLYMERASE | | | | | | | |
| | (SEQ ID NO: | | | | | | | |
| | 1708) | | | | | | | |
| 1301 | ORF1AB_RNA- | 568-587 | NRQ:FHQKLLKSIAATRG: | 6 | 20 | 35.77 | 20 | 2.14 |
| (1612) | DEPENDENT_ | | ATV | | | | | |
| | RNA_ | | | | | | | |
| | POLYMERASE | | | | | | | |
| | (SEQ ID NO: | | | | | | | |
| | 1708) | | | | | | | |
| 1302 | ORF1AB_RNA- | 591-610 | TSK:FYGGWHNMLKTVYS | 12 | 11 | 15.98 | 2 | 0.17 |
| (1613) | DEPENDENT_ | | :DVE | | | | | |
| | RNA_ | | | | | | | |
| | POLYMERASE | | | | | | | |
| | (SEQ ID NO: | | | | | | | |
| | 1708) | | | | | | | |
| 1303 | ORF1AB_RNA- | 626-643 | MPN:MLRIMASLVLAR:K | 15 | 20 | 42.54 | 16 | 1.71 |
| (1614) | DEPENDENT_ | | HT | | | | | |
| | RNA_ | | | | | | | |
| | POLYMERASE | | | | | | | |
| | (SEQ ID NO: | | | | | | | |
| | 1708) | | | | | | | |
| 1304 | ORF1AB_RNA- | 633-647 | MAS:LVLARKHTT:CCS | 2 | 6 | 10.13 | 2 | 0.29 |
| (1615) | DEPENDENT_ | | | | | | | |
| | RNA_ | | | | | | | |
| | POLYMERASE | | | | | | | |
| | (SEQ ID NO: | | | | | | | |
| | 1708) | | | | | | | |
| 1305 | ORF1AB_RNA- | 649-664 | SHR:FYRLANECAQ:VLS | 3 | 8 | 15.28 | 0 | 0 |
| (1616) | DEPENDENT_ | | | | | | | |
| | RNA_ | | | | | | | |
| | POLYMERASE | | | | | | | |
| | (SEQ ID NO: | | | | | | | |
| | 1708) | | | | | | | |
| 1306 | ORF1AB_RNA- | 693-711 | VFN:ICQAVTANVNALL:S | 6 | 12 | 19.60 | 11 | 1.86 |
| (1617) | DEPENDENT_ | | TD | | | | | |
| | RNA_ | | | | | | | |
| | POLYMERASE | | | | | | | |
| | (SEQ ID NO: | | | | | | | |
| | 1708) | | | | | | | |
| 1307 | ORF1AB_RNA- | 701-718 | :TANVNALLSTDGNKI:AD | 8 | 8 | 9.04 | 7 | 1.75 |
| (1618) | DEPENDENT_ | | K | | | | | |
| | RNA_ | | | | | | | |
| | POLYMERASE | | | | | | | |
| | (SEQ ID NO: | | | | | | | |
| | 1708) | | | | | | | |
| 1308 | ORF1AB_RNA- | 716-731 | ADK:YVRNLQHRLY:ECL | 8 | 10 | 19.14 | 4 | 0.82 |
| (1619) | DEPENDENT_ | | | | | | | |
| | RNA_ | | | | | | | |
| | POLYMERASE | | | | | | | |
| | (SEQ ID NO: | | | | | | | |
| | 1708) | | | | | | | |
| 1309 | ORF1AB_RNA- | 738-760 | DTD:FVNEFYAYL | 16 | 18 | 28.46 | 4 | 0.28 |
| (1620) | DEPENDENT_ | | RKHFSMMI:LSD | | | | | |
| | RNA_ | | | | | | | |
| | POLYMERASE | | | | | | | |
| | (SEQ ID NO: | | | | | | | |
| | 1708) | | | | | | | |
| 1310 | ORF1AB_RNA- | 760-777 | DDA:VVCFNSTYASQG:LV | 11 | 11 | 17.69 | 0 | 0 |
| (1621) | DEPENDENT_ | | A | | | | | |
| | RNA_ | | | | | | | |
| | POLYMERASE | | | | | | | |
| | (SEQ ID NO: | | | | | | | |
| | 1708) | | | | | | | |
| 1311 | ORF1AB_RNA- | 776-798 | VAS:IKNFKSVLYY | 18 | 19 | 32.13 | 5 | 0.39 |
| (1622) | DEPENDENT_ | | QNNVFMS:EAK | | | | | |
| | RNA_ | | | | | | | |
| | POLYMERASE | | | | | | | |
| | (SEQ ID NO: | | | | | | | |
| | 1708) | | | | | | | |
| 1312 | ORF1AB_RNA- | 809-823 | PHE:FCSQHTMLV:KQG | 8 | 6 | 11.70 | 0 | 0 |
| (1623) | DEPENDENT_ | | | | | | | |
| | RNA_ | | | | | | | |
| | POLYMERASE | | | | | | | |
| | (SEQ ID NO: | | | | | | | |
| | 1708) | | | | | | | |
| 1313 | ORF1AB_RNA- | 853-867 | TLM:IERFVSLAI:DAY | 12 | 6 | 13.02 | 4 | 2 |
| (1624) | DEPENDENT_ | | | | | | | |
| | RNA_ | | | | | | | |
| | POLYMERASE | | | | | | | |
| | (SEQ ID NO: | | | | | | | |
| | 1708) | | | | | | | |
| 1314 | ORF1AB_RNA- | 878-899 | ADV:FHLYLQYIR | 15 | 16 | 24.38 | 8 | 0.71 |
| (1625) | DEPENDENT_ | | KLHDELT:GHM | | | | | |
| | RNA_ | | | | | | | |
| | POLYMERASE | | | | | | | |
| | (SEQ ID NO: | | | | | | | |
| | 1708) | | | | | | | |
| 1315 | ORF1AB_RNA- | 896-918 | TGH:MLDMYSVM | 23 | 11 | 13.76 | 1 | 0.09 |
| (1626) | DEPENDENT_ | | LTNDNTSRY:WEP | | | | | |
| | RNA_ | | | | | | | |
| | POLYMERASE | | | | | | | |
| | (SEQ ID NO: | | | | | | | |
| | 1708) | | | | | | | |
| 1316 | ORF1AB_ | 030-046 | CYD:HVISTSHKLVL:SVN | 4 | 10 | 17.06 | 16 | 1.62 |
| (1627) | HELICASE | | | | | | | |
| | (SEQ ID NO: | | | | | | | |
| | 1709) | | | | | | | |
| 1317 | ORF1AB_ | 038-053 | SHK:LVLSVNPYVC:NAP | 4 | 11 | 20.30 | 4 | 0.58 |
| (1628) | HELICASE | | | | | | | |
| | (SEQ ID NO: | | | | | | | |
| | 1709) | | | | | | | |
| 1318 | ORF1AB_ | 086-104 | NGQ:VFGLYKNTCVGSD: | 4 | 9 | 12.97 | 3 | 0.33 |
| (1629) | HELICASE | | NVT | | | | | |
| | (SEQ ID NO: | | | | | | | |
| | 1709) | | | | | | | |
| 1319 | ORF1AB_ | 127-143 | TER:LKLFAAETLKA:TEE | 4 | 14 | 25.30 | 3 | 0.71 |
| (1630) | HELICASE | | | | | | | |
| | (SEQ ID NO: | | | | | | | |
| | 1709) | | | | | | | |
| 1320 | ORF1AB_ | 142-160 | EET:FKLSYGIATVREV:LSD | 8 | 8 | 14.36 | 3 | 0.75 |
| (1631) | HELICASE | | | | | | | |
| | (SEQ ID NO: | | | | | | | |
| | 1709) | | | | | | | |
| 1321 | ORF1AB_ | 182-198 | FTG:YRVTKNSKVQI:GEY | 2 | 10 | 19.77 | 10 | 2.00 |
| (1632) | HELICASE | | | | | | | |
| | (SEQ ID NO: | | | | | | | |
| | 1709) | | | | | | | |
| 1322 | ORF1AB_ | 208-223 | AVV:YRGTTTYKLN:VGD | 12 | 7 | 13.35 | 2 | 0.38 |
| (1633) | HELICASE | | | | | | | |
| | (SEQ ID NO: | | | | | | | |
| | 1709) | | | | | | | |
| 1323 | ORF1AB_ | 221-236 | VGD:YFVLTSHTVM:PLS | 10 | 8 | 15.19 | 4 | 0.67 |
| (1634) | HELICASE | | | | | | | |
| | (SEQ ID NO: | | | | | | | |
| | 1709) | | | | | | | |
| 1324 | ORF1AB_ | 229-243 | SHT:VMPLSAPTL:VPQ | 10 | 2 | 3.06 | 1 | 0.67 |
| (1635) | HELICASE | | | | | | | |
| | (SEQ ID NO: | | | | | | | |
| | 1709) | | | | | | | |
| 1325 | ORF1AB_ | 243-260 | QEH:YVRITGLYPTLN:ISD | 6 | 8 | 11.70 | 4 | 0.50 |
| (1636) | HELICASE | | | | | | | |
| | (SEQ ID NO: | | | | | | | |
| | 1709) | | | | | | | |
| 1326 | ORF1AB_ | 259-273 | SDE:FSSNVANYQ:KVG | 5 | 6 | 12.95 | 0 | 0.00 |
| (1637) | HELICASE | | | | | | | |
| | (SEQ ID NO: | | | | | | | |
| | 1709) | | | | | | | |
| 1327 | ORF1AB_ | 271-288 | KVG:MQKYSTLQGPPG:T | 3 | 7 | 10.02 | 9 | 1.50 |
| (1638) | HELICASE | | GK | | | | | |
| | (SEQ ID NO: | | | | | | | |
| | 1709) | | | | | | | |
| 1328 | ORF1AB_ | 340-353 | VEC:FDKFKVNST:LE | 2 | 4 | 6.74 | 0 | 0.00 |
| (1639) | HELICASE | | | | | | | |
| | (SEQ ID NO: | | | | | | | |
| | 1709) | | | | | | | |
| 1329 | ORF1AB_ | 344-357 | DK:FKVNSTLEQ:YVF | 7 | 7 | 14.65 | 5 | 2.38 |
| (1640) | HELICASE | | | | | | | |
| | (SEQ ID NO: | | | | | | | |
| | 1709) | | | | | | | |
| 1330 | ORF1AB_ | 379-401 | ATN:YDLSVVNA | 5 | 11 | 13.62 | 12 | 1.36 |
| (1641) | HELICASE | | RLRAKHYVY:IGD | | | | | |
| | (SEQ ID NO: | | | | | | | |
| | 1709) | | | | | | | |
| 1331 | ORF1AB_ | 418-432 | EPE:YFNSVCRLMK:TI | 5 | 9 | 17.54 | 1 | 0.11 |
| (1642) | HELICASE | | | | | | | |
| | (SEQ ID NO: | | | | | | | |
| | 1709) | | | | | | | |
| 1332 | ORF1AB_ | 469-495 | AQC:FKMFYKGVIT | 10 | 20 | 30.69 | 3 | 0.35 |
| (1643) | HELICASE | | HDVSSAINRPQ:IGV | | | | | |
| | (SEQ ID NO: | | | | | | | |
| | 1709) | | | | | | | |
| 1333 | ORF1AB_ | 507-528 | RKA:VFISPYNSQNAVASK | 9 | 19 | 31.53 | 6 | 0.52 |
| (1644) | HELICASE | | I:LGL | | | | | |
| | (SEQ ID NO: | | | | | | | |
| | 1709) | | | | | | | |
| 1334 | ORF1AB_ | 555-576 | SCN:VNRFNVAITRAKVGI | 7 | 15 | 22.59 | 4 | 0.53 |
| (1645) | HELICASE | | L:CIM | | | | | |
| | (SEQ ID NO: | | | | | | | |
| | 1709) | | | | | | | |
| 1335 | ORF1AB_3- | 048-065 | DMT:YRRLISMMGFKM:N | 21 | 12 | 26.54 | 0 | 0 |
| (1646) | TO- | | YQ | | | | | |
| | 5_ | | | | | | | |
| | EXONUCLEASE | | | | | | | |
| | (SEQ ID NO: | | | | | | | |
| | 1710) | | | | | | | |
| 1336 | ORF1AB_3- | 104-128 | NLP:LQLGFSTGV | 11 | 14 | 15.63 | 3 | 0.43 |
| (1647) | TO- | | NLVAVPTGYV:DTP | | | | | |
| | 5_ | | | | | | | |
| | EXONUCLEASE | | | | | | | |
| | (SEQ ID NO: | | | | | | | |
| | 1710) | | | | | | | |
| 1337 | ORF1AB_3- | 143-165 | GDQ:FKHLIPLMY | 16 | 17 | 28.76 | 2 | 0.24 |
| (1648) | TO- | | KGLPWNVV:RIK | | | | | |
| | 5_ | | | | | | | |
| | EXONUCLEASE | | | | | | | |
| | (SEQ ID NO: | | | | | | | |
| | 1710) | | | | | | | |
| 1338 | ORF1AB_3- | 156-177 | GLP:WNVVRIK | 12 | 11 | 15.57 | 1 | 0.08 |
| (1649) | TO- | | IVQMLSDTL:KNL | | | | | |
| | 5_ | | | | | | | |
| | EXONUCLEASE | | | | | | | |
| | (SEQ ID NO: | | | | | | | |
| | 1710) | | | | | | | |
| 1339 | ORF1AB_3- | 302-324 | ELK:INAACRKV | 5 | 12 | 15.18 | 8 | 0.71 |
| (1650) | TO- | | QHMVVKAAL:LAD | | | | | |
| | 5_ | | | | | | | |
| | EXONUCLEASE | | | | | | | |
| | (SEQ ID NO: | | | | | | | |
| | 1710) | | | | | | | |
| 1340 | ORF1AB_3- | 401-416 | FDT:RVLSNLNLPG:CDG | 0 | 9 | 18.48 | 44 | 11.55 |
| (1651) | TO- | | | | | | | |
| | 5_ | | | | | | | |
| | EXONUCLEASE | | | | | | | |
| | (SEQ ID NO: | | | | | | | |
| | 1710) | | | | | | | |
| 1341 | ORF1AB_3- | 416-431 | GGS:LYVNKHAFHT:PAF | 8 | 7 | 10.8 | 1 | 0.25 |
| (1652) | TO- | | | | | | | |
| | 5_ | | | | | | | |
| | EXONUCLEASE | | | | | | | |
| | (SEQ ID NO: | | | | | | | |
| | 1710) | | | | | | | |
| 1342 | ORF1AB_3- | 434-448 | SA:FVNLKQLPFF:YYS | 10 | 10 | 18.32 | 2 | 0.5 |
| (1653) | TO- | | | | | | | |
| | 5_ | | | | | | | |
| | EXONUCLEASE | | | | | | | |
| | (SEQ ID NO: | | | | | | | |
| | 1710) | | | | | | | |
| 1343 | ORF1AB_3- | 462-479 | DID:YVPLKSATCITR:CNL | 5 | 8 | 12.05 | 1 | 0.13 |
| (1654) | TO- | | | | | | | |
| | 5_ | | | | | | | |
| | EXONUCLEASE | | | | | | | |
| | (SEQ ID NO: | | | | | | | |
| | 1710) | | | | | | | |
| 1344 | ORF1AB_3- | 495-513 | LDA:YNMMISAGFSLWV: | 26 | 14 | 25.79 | 4 | 0.36 |
| (1655) | TO- | | YKQ | | | | | |
| | 5_ | | | | | | | |
| | EXONUCLEASE | | | | | | | |
| | (SEQ ID NO: | | | | | | | |
| | 1710) | | | | | | | |
| 1345 | ORF1AB_ | 002-018 | LEN:VAFNVVNKGHF:DG | 3 | 8 | 12.71 | 1 | 0.13 |
| (1656) | ENDORNASE | | Q | | | | | |
| | (SEQ ID NO: | | | | | | | |
| | 1711) | | | | | | | |
| 1346 | ORF1AB_ | 065-082 | PVP:EVKILNNLGVDI:AAN | 4 | 16 | 31.14 | 9 | 1.19 |
| (1657) | ENDORNASE | | | | | | | |
| | (SEQ ID NO: | | | | | | | |
| | 1711) | | | | | | | |
| 1347 | ORF1AB_ | 085-099 | IWD:YKRDAPAHI:STI | 2 | 6 | 12.58 | 1 | 0.17 |
| (1658) | ENDORNASE | | | | | | | |
| | (SEQ ID NO: | | | | | | | |
| | 1711) | | | | | | | |
| 1348 | ORF1AB_ | 130-145 | QVD:LFRNARNGVL:ITE | 4 | 12 | 26.64 | 1 | 0.08 |
| (1659) | ENDORNASE | | | | | | | |
| | (SEQ ID NO: | | | | | | | |
| | 1711) | | | | | | | |
| 1349 | ORF1AB_ | 145-162 | EGS:VKGLQPSVGPKQ:AS | 4 | 9 | 13.1 | 5 | 0.78 |
| (1660) | ENDORNASE | | L | | | | | |
| | (SEQ ID NO: | | | | | | | |
| | 1711) | | | | | | | |
| 1350 | ORF1AB_ | 190-211 | PET:YFTQSRNLQEFKPRS | 8 | 14 | 20.99 | 11 | 1.93 |
| (1661) | ENDORNASE | | Q:MEI | | | | | |
| | (SEQ ID NO: | | | | | | | |
| | 1711) | | | | | | | |
| 1351 | ORF1AB_ | 237-263 | YGD:FSHSQLGGLH | 16 | 18 | 24.65 | 6 | 0.33 |
| (1662) | ENDORNASE | | LLIGLAKRFKE:SPF | | | | | |
| | (SEQ ID NO: | | | | | | | |
| | 1711) | | | | | | | |
| 1352 | ORF1AB_ | 300-316 | DDF:VEIIKSQDLSV:VSK | 4 | 8 | 13.64 | 6 | 1.2 |
| (1663) | ENDORNASE | | | | | | | |
| | (SEQ ID NO: | | | | | | | |
| | 1711) | | | | | | | |
| 1353 | ORF1AB_2-O- | 011-026 | MPN:LYKMQRMLLE:KCD | 8 | 8 | 16.48 | 4 | 0.63 |
| (1664) | RIBOSE | | | | | | | |
| | _METHYL | | | | | | | |
| | TRANSFERASE | | | | | | | |
| | (SEQ ID NO: | | | | | | | |
| | 1712) | | | | | | | |
| 1354 | ORF1AB_2-O- | 044-058 | VAK:YTQLCQYLN:TLT | 10 | 5 | 8.87 | 3 | 0.57 |
| (1665) | RIBOSE | | | | | | | |
| | _METHYL | | | | | | | |
| | TRANSFERASE | | | | | | | |
| | (SEQ ID NO: | | | | | | | |
| | 1712) | | | | | | | |
| 1355 | ORF1AB_2-O- | 054-068 | LNT:LTLAVPYNM:RVI | 8 | 6 | 11.14 | 0 | 0.00 |
| (1666) | RIBOSE | | | | | | | |
| | _METHYL | | | | | | | |
| | TRANSFERASE | | | | | | | |
| | (SEQ ID NO: | | | | | | | |
| | 1712) | | | | | | | |
| 1356 | ORF1AB_2-O- | 081-095 | GTA:VLRQWLPTGT:LL | 5 | 6 | 9.52 | 0 | 0.00 |
| (1667) | RIBOSE | | | | | | | |
| | _METHYL | | | | | | | |
| | TRANSFERASE | | | | | | | |
| | (SEQ ID NO: | | | | | | | |
| | 1712) | | | | | | | |
| 1357 | ORF1AB_2-O- | 147-161 | EGF:FTYICGFIQ:QKL | 10 | 4 | 7.26 | 0 | 0.00 |
| (1668) | RIBOSE | | | | | | | |
| | _METHYL | | | | | | | |
| | TRANSFERASE | | | | | | | |
| | (SEQ ID NO: | | | | | | | |
| | 1712) | | | | | | | |
| 1358 | ORF1AB_2-O- | 153-170 | ICG:FIQQKLALGGSV:AIK | 5 | 14 | 26.33 | 20 | 2.67 |
| (1669) | RIBOSE | | | | | | | |
| | _METHYL | | | | | | | |
| | TRANSFERASE | | | | | | | |
| | (SEQ ID NO: | | | | | | | |
| | 1712) | | | | | | | |
| 1359 | ORF1AB_2-O- | 173-187 | ADL:YKLMGHFAW:WTA | 16 | 5 | 9.08 | 1 | 0.29 |
| (1670) | RIBOSE | | | | | | | |
| | _METHYL | | | | | | | |
| | TRANSFERASE | | | | | | | |
| | (SEQ ID NO: | | | | | | | |
| | 1712) | | | | | | | |
| 1360 | ORF1AB_2-O- | 186-200 | HFA:WWTAFVTNVN:AS | 7 | 6 | 10.74 | 1 | 0.50 |
| (1671) | RIBOSE | | | | | | | |
| | _METHYL | | | | | | | |
| | TRANSFERASE | | | | | | | |
| | (SEQ ID NO: | | | | | | | |
| | 1712) | | | | | | | |
| 1361 | ORF1AB_2-O- | 191-208 | TA:FVTNVNASSSEAF:LIG | 1 | 18 | 34.78 | 8 | 1.22 |
| (1672) | RIBOSE | | | | | | | |
| | _METHYL | | | | | | | |
| | TRANSFERASE | | | | | | | |
| | (SEQ ID NO: | | | | | | | |
| | 1712) | | | | | | | |
| 1362 | ORF1AB_2-O- | 202-216 | SEA:FLIGCNYLG:KPR | 11 | 7 | 15.41 | 0 | 0.00 |
| (1673) | RIBOSE | | | | | | | |
| | _METHYL | | | | | | | |
| | TRANSFERASE | | | | | | | |
| | (SEQ ID NO: | | | | | | | |
| | 1712) | | | | | | | |
| 1363 | ORF1AB_2-O- | 226-242 | ANY:IFWRNTNPIQL:SSY | 11 | 14 | 28.01 | 1 | 0.07 |
| (1674) | RIBOSE | | | | | | | |
| | _METHYL | | | | | | | |
| | TRANSFERASE | | | | | | | |
| | (SEQ ID NO: | | | | | | | |
| | 1712) | | | | | | | |
| 1364 | ORF1AB_2-O- | 267-285 | IND:MILSLLSKGRLII:REN | 11 | 27 | 50.22 | 38 | 2.80 |
| (1675) | RIBOSE | | | | | | | |
| | _METHYL | | | | | | | |
| | TRANSFERASE | | | | | | | |
| | (SEQ ID NO: | | | | | | | |
| | 1712) | | | | | | | |
| 1365 | ORF1AB_2-O- | 277-293 | KGR:LIIRENNRVVI:SSD | 4 | 13 | 24.71 | 3 | 0.46 |
| (1676) | RIBOSE | | | | | | | |
| | _METHYL | | | | | | | |
| | TRANSFERASE | | | | | | | |
| | (SEQ ID NO: | | | | | | | |
| | 1712) | | | | | | | |
| 1713 | ORF1AB_ | 226-242 | ANY:IFWRNTNPIQL:SSY | 11 | | 28.01 | | 0.07 |
| (2562) | METHYL | | | | | | | |
| | TRANSFERASE | | | | | | | |
| | (SEQ ID NO: | | | | | | | |
| | 1712) | | | | | | | |
| 1723 | ORF1AB_RNA | 738-760 | DTD:FVNEFYAYLRKHFS | 16 | | 28.46 | | 0.28 |
| (2563) | _POLYMERASE | | MM I:LSD | | | | | |
| | (SEQ ID NO: | | | | | | | |
| | 1708) | | | | | | | |
| 1724 | ORF1AB_RNA- | 736-760 | DVDTD:F | | | | | |
| (2564) | _POLYMERASE | | VNEFYAYLRKHFSMMI:LS | | | | | |
| | _MOD | | D | | | | | |
| | (SEQ ID NO: | | | | | | | |
| | 1712) | | | | | | | |
| 1742 | ORF1AB_NSP | 162-182 | ISM:WALIISVTSNYSGVV: | 16 | | 41.16 | | 0.18 |
| (2565) | 6 | | TTV | | | | | |
| | (SEQ ID NO: | | | | | | | |
| | 1703) | | | | | | | |
| 1756 | ORF1AB_RNA- | 776-798 | VAS:IKNFKSVLYYQNNVF | 18 | | 32.13 | | 0.39 |
| (2566) | _POLYMERASE | | MS:EAK | | | | | |
| | (SEQ ID NO: | | | | | | | |
| | 1708) | | | | | | | |
| 1772 | ORF1AB_NSP | 182-198 | WPL:IVTALRANSAVKL:Q | 4 | | 39.66 | | 0.95 |
| (2567) | 8 | | | | | | | |
| | (SEQ ID NO: | | | | | | | |
| | 1705) | | | | | | | |
| 1782 | SPIKE | 446-468 | GGN: | 14 | | 58.68 | | 1.10 |
| (2568) | (SEQ ID NO: | | YNYLYRLFRKSNLKPFE: | | | | | |
| | 3) | | RDI | | | | | |
| 1783 | SPIKE | 444-468 | KVGGN:YNYLYRLFRKSNL | | | | | |
| (2569) | MOD (SEQ ID | | KPFE:RDI | | | | | |
| | NO: 3) | | | | | | | |
| 1801 | ORF1AB_RNA | 626-643 | MPN:MLRIMASLVLAR:K | 15 | | 42.54 | | 1.71 |
| (2570) | _POLYMERASE | | HT | | | | | |
| | (SEQ ID NO: | | | | | | | |
| | 1708) | | | | | | | |
| 1812 | ORF1AB_NSP | 435-458 | LLP:LTQYNRYLALYNKYK | 21 | | 37.02 | | 0.3 |
| (2571) | 4 | | YFS:GAM | | | | | |
| | (SEQ ID NO: | | | | | | | |
| | 1701) | | | | | | | |
| 1813 | ORF1AB_NSP | 435-459 | LLP:LTQYNRYLALYNKYK | | | | | |
| (2572) | 4 | | YFS:GAMD | | | | | |
| | MOD (SEQ ID | | | | | | | |
| | NO: 1701) | | | | | | | |
| 1831 | ORF1AB_EXO | 48-65 | DMT: | 21 | | 26.54 | | 0.0 |
| (2573) | NUCLEASE | | YRRLISMMGFKM:NYQ | | | | | |
| | (SEQ ID NO: | | | | | | | |
| | 1710) | | | | | | | |
| 1832 | ORF1AB_ | 48-66 | DMT:YRRLISMMGFKM:N | | | | | |
| (2574) | EXONUCLEASE | | YQV | | | | | |
| | MOD (SEQ ID | | | | | | | |
| | NO: 1710) | | | | | | | |
| 1844 | ORF1AB_ | 143-165 | GDQ:FKHLIPLMYKGLPW | 16 | | 28.76 | | 0.24 |
| (2575) | EXONUCLEASE | | NVV:RIK | | | | | |
| | (SEQ ID NO: | | | | | | | |
| | 1710) | | | | | | | |
| 1860 | ORF1AB_RNA | 539-559 | ITQ:MNLKYAISAKNRART | 5 | | 25.08 | | 0.41 |
| (2576) | _POLYMERASE | | :VAG | | | | | |
| | (SEQ ID NO: | | | | | | | |
| | 1708) | | | | | | | |
| 1861 | ORF1AB_RNA | 536-559 | IPTITQ:MNLKYAISAKNR | | | | | |
| (2577) | _POLYMERASE | | ART:VAG | | | | | |
| | MOD (SEQ ID | | | | | | | |
| | NO: 1708) | | | | | | | |
| 1878 | ORF1AB_ | 191-208 | TA:FVTNVNASSSEAF:LIG | 1 | | 34.78 | | 1.22 |
| (2578) | METHYL | | | | | | | |
| | TRANSFERASE | | | | | | | |
| | (SEQ ID NO: | | | | | | | |
| | 1712) | | | | | | | |
| 1879 | ORF1AB_ | 191-205 | TA:FVTNVNASSSEAF: | | | | | |
| (2579) | METHYL | | | | | | | |
| | TRANSFERASE | | | | | | | |
| | MOD (SEQ ID | | | | | | | |
| | NO: 1712) | | | | | | | |
| 1890 | ORF1AB_NSP | 88-101 | LY:FIKGLNNLNR:GM | 3 | | 34.37 | | 1.9 |
| (2580) | 9 | | | | | | | |
| | (SEQ ID NO: | | | | | | | |
| | 1706) | | | | | | | |
| 1891 | ORF1AB_NSP | 88-100 | LY:FIKGLNNLNR:G | | | | | |
| (2581) | 9 | | | | | | | |
| | MOD (SEQ ID | | | | | | | |
| | NO: 1706) | | | | | | | |
| 1898 | ORF1AB_ | 507-528 | RKA:VFISPYNSQNAVASK | 9 | | 31.53 | | 0.52 |
| (2582) | HELICASE | | I:LGL | | | | | |
| | (SEQ ID NO: | | | | | | | |
| | 1709) | | | | | | | |
| 1913 | ORF1AB_ | 258-279 | VDA:VNLLTNMFTPLIQPI | 19 | | 30.35 | | 0.52 |
| (2583) | NSP4 | | G:ALD | | | | | |
| | (SEQ ID NO: | | | | | | | |
| | 1701) | | | | | | | |
| 1928 | ORF1AB_ | 277-293 | KGR:LIIRENNRVVI:SSD | 4 | | 24.71 | | 0.46 |
| (2584) | METHYL | | | | | | | |
| | TRANSFERASE | | | | | | | |
| | (SEQ ID NO: | | | | | | | |
| | 1712) | | | | | | | |
| 1929 | ORF1AB_ | 277-292 | KGR:LIIRENNRVVI:SS | | | | | |
| (2585) | METHYL | | | | | | | |
| | TRANSFERASE | | | | | | | |
| | MOD (SEQ ID | | | | | | | |
| | NO: 1712) | | | | | | | |
| 1939 | ORF1AB_ | 127-143 | TER:LKLFAAETLKA:TEE | 4 | | 25.3 | | 0.71 |
| (2586) | HELICASE | | | | | | | |
| | (SEQ ID NO: | | | | | | | |
| | 1709) | | | | | | | |
| 1949 | ORF1AB_ | 555-576 | SSN:VNRFNVAITRAKVGI | 7 | | 22.59 | | 0.53 |
| (2587) | HELICASE | | L:SIM | | | | | |
| | (SEQ ID NO: | | | | | | | |
| | 1709) | | | | | | | |
| 1964 | ORF1AB_ | 416-431 | GGS:LYVNKHAFHT:PAF | 8 | | 10.8 | | 0.25 |
| (2588) | EXONUCLEASE | | | | | | | |
| | (SEQ ID NO: | | | | | | | |
| | 1710) | | | | | | | |
| 1965 | ORF1AB_ | 416-432 | GGS:LYVNKHAFHT:PAFD | | | | | |
| (2589) | EXONUCLEASE | | | | | | | |
| | MOD (SEQ ID | | | | | | | |
| | NO: 1710) | | | | | | | |
| 1975 | SPIKE | 114-130 | TQS:LLIVNNATNVVI:KV | 5 | | 36.68 | | 0.52 |
| (2590) | (SEQ ID NO: | | | | | | | |
| | 3) | | | | | | | |
| 1985 | ORF1AB_NSP | 1700-1720 | LSH:FVNLDNLRANNTKG | 3 | | 39.96 | | 0.21 |
| (2591) | 3 | | S:LPI | | | | | |
| | (SEQ ID NO: | | | | | | | |
| | 1700) | | | | | | | |
| 1999 | ORF1AB_ | 54-72 | YED:LLIRKSNHNFLVQ:AG | 6 | | 35.29 | | 6 |
| (2592) | PROTEINASE | | N | | | | | |
| | (SEQ ID NO: | | | | | | | |
| | 1702) | | | | | | | |
| 2647 | SPIKE | 61-78 | NVT:WFHAIHVSGTNG:T | | | | | |
| (2648) | (SEQ ID NO: | | KR | | | | | |
| | 3) | | | | | | | |
| 2649 | SPIKE | 61-78 | NVT:WFHAISGTNG:TKR | | | | | |
| (2650) | (SEQ ID NO: | (del69_ | | | | | | |
| | 3) | 70) | | | | | | |
| 2651 | SPIKE | 61-156 | FLG:YYHKNNKSWM:ESE | | | | | |
| (2652) | (SEQ ID NO: | (del144) | | | | | | |
| | 3) | | | | | | | |
| 2653 | SPIKE | 61-156 | FLG:YYHKNNKSWM:ESE | | | | | |
| (2654) | (SEQ ID NO: | (del144) | | | | | | |
| | 3) | | | | | | | |
| 2655 | SPIKE | 232-247 | GIN:ITRFQTLLALHR:S | | | | | |
| (2656) | (SEQ ID NO: | | | | | | | |
| | 3) | | | | | | | |
| 2657 | SPIKE | 232-247 | [symbol] | | | | | |
| (2658) | (SEQ ID NO: | | | | | | | |
| | 3) | | | | | | | |
| 2659 | SPIKE | 445-461 | VGG:NYNYLYRLFRK:SNL | | | | | |
| (2660) | (SEQ ID NO: | | | | | | | |
| | 3) | | | | | | | |
| 2661 | SPIKE | 445-461 | [symbol] | | | | | |
| (2662) | (SEQ ID NO: | | | | | | | |
| | 3) | | | | | | | |
| 2663 | SPIKE | 478-494 | [symbol] | | | | | |
| (2664) | (SEQ ID NO: | | | | | | | |
| | 3) | | | | | | | |
| 2665 | SPIKE | 492-508 | [symbol] | | | | | |
| (2666) | (SEQ ID NO: | | | | | | | |
| | 3) | | | | | | | |
| 2667 | SPIKE | 492-508 | [symbol] | | | | | |
| (2668) | (SEQ ID NO: | | | | | | | |
| | 3) | | | | | | | |
| 2669 | SPIKE | 673-689 | SYQ:TQTNSPRRARS:VAS | | | | | |
| (2670) | (SEQ ID NO: | | | | | | | |
| | 3) | | | | | | | |
| 2671 | SPIKE | 673-689 | [symbol] | | | | | |
| (2672) | (SEQ ID NO: | | | | | | | |
| | 3) | | | | | | | |
| 2673 | SPIKE | 715-729 | PIN:FTISVTTEI:LPV | | | | | |
| (2674) | (SEQ ID NO: | | | | | | | |
| | 3) | | | | | | | |
| 2675 | SPIKE | 512-526 | VLS:FELLHAPAT:VEG | | | | | |
| (2676) | (SEQ ID NO: | | | | | | | |
| | 3) | | | | | | | |
| 2677 | ORF3A | 157-174 | SIP:YNSVTSSIVITS:GDG | | | | | |
| (2678) | (SEQ ID NO: | | | | | | | |
| | 1694) | | | | | | | |
| 2679 | ORF1AB_NSP | 1324-1342 | AKP:FLNKVVSTTTNIV:TR | | | | | |
| (2680) | 3 | | S | | | | | |
| | (SEQ ID NO: | | | | | | | |
| | 1700) | | | | | | | |
| 2681 | ORF1AB_NSP | 1422-1446 | LGS:LIYSTAALGVLMSNL | | | | | |
| (2682) | 3 | | GMPS:YST | | | | | |
| | (SEQ ID NO: | | | | | | | |
| | 1700) | | | | | | | |
| 2683 | ORF1AB_NSP | 1592-1606 | MMS:YKRNRATRV:EST | | | | | |
| (2684) | 3 | | | | | | | |
| | (SEQ ID NO: | | | | | | | |
| | 1700) | | | | | | | |
| 2685 | ORF1AB_NSP | 1592-1606 | MME:YKRNRATRV:EST | | | | | |
| (2686) | 3 | | | | | | | |
| | (SEQ ID NO: | | | | | | | |
| | 1700) | | | | | | | |
| 2687 | ORF1AB_NSP | 1449-1464 | REG:YLNSTNVTIA:TYS | | | | | |
| (2688) | 3 | | | | | | | |
| | (SEQ ID NO: | | | | | | | |
| | 1700) | | | | | | | |
| 2689 | ORF1AB_NSP | 258-275 | VDA:VNLLTNMFTPLI:QPI | | | | | |
| (2690) | 4 | | | | | | | |
| | (SEQ ID NO: | | | | | | | |
| | 1701) | | | | | | | |
| 2691 | ORF1AB_NSP | 100-118 | NDA:LNNIINNARDGS | | | | | |
| (2692) | 8 | | | | | | | |
| | (SEQ ID NO: | | | | | | | |
| | 1705) | | | | | | | |
| 2693 | ORF1AB_HELI | 469-495 | AQS:FKMFYKGVITHDVSS | | | | | |
| (2694) | CASE | | AINRPQ:IGV | | | | | |
| | (SEQ ID NO: | | | | | | | |
| | 1709) | | | | | | | |
| 2695 | ORF1AB_HELI | 555-576 | SSN:VNRFNVAITRAKVGI | | | | | |
| (2696) | CASE | | L:SIM | | | | | |
| | (SEQ ID NO: | | | | | | | |
| | 1709) | | | | | | | |
| 2697 | ORF1AB_3 | 054-071 | YED:LLIRKSNHNFLVQ:AG | | | | | |
| (2698) | C-LIKE_ | | | | | | | |
| | PROTEINASE | | | | | | | |
| | (SEQ ID NO: | | | | | | | |
| | 1702) | | | | | | | |
| 2699 | ORF1AB_2-O- | 011-026 | MPN:LYKMQRMLLE:KDD | | | | | |
| (2700) | RIBOSE | | | | | | | |
| | _METHYL | | | | | | | |
| | TRANSFERASE | | | | | | | |
| | (SEQ ID NO: | | | | | | | |
| | 1712) | | | | | | | |
| 2701 | SPIKE | 492-508 | [symbol] | | | | | |
| (2702) | (SEQ ID NO: | | R | | | | | |
| | 3) | | | | | | | |
| 2703 | SPIKE | 492-508 | [symbol] | | | | | |
| (2704) | (SEQ ID NO: | | R | | | | | |
| | 3) | | | | | | | |
| 2705 | NUCLEOCAPS | 081-098 | DDQ:IGYYRRATRRIR:GG | | | | | |
| (2706) | ID | | DG | | | | | |
| | (SEQ ID NO: | | | | | | | |
| | 1693) | | | | | | | |
| 2707 | ORF3A | 102-119 | KEAP:FLYLYALVYFLQ:SIN | | | | | |
| (2708) | (SEQ ID NO: | | | | | | | |
| | 1694) | | | | | | | |
| 2709 | ORF3A | 157-174 | KIP:YNSVTSSIVITS:GDGT | | | | | |
| (2710) | (SEQ ID NO: | | | | | | | |
| | 1694) | | | | | | | |
| 2711 | ORF1AB_NSP | 1422-1446 | KLGS:LIYSTAALGVLMSNL | | | | | |
| (2712) | 3 | | GMPS:YST | | | | | |
| | (SEQ ID NO: | | | | | | | |
| | 1700) | | | | | | | |
| 2713 | ORF1AB_NSP | 338-364 | KPG:VYSVIYLYLTF | | | | | |
| (2714) | 4 | | YLTNDVSFLA:HIQ | | | | | |
| | (SEQ ID NO: | | | | | | | |
| | 1701) | | | | | | | |
| 2715 | ORF1AB_NSP | 162-182 | KISM:WALIISVTSNYSGV | | | | | |
| (2716) | 6 | | V:TTV | | | | | |
| | (SEQ ID NO: | | | | | | | |
| | 1703) | | | | | | | |
| 2717 | ORF1AB_RNA- | 539-558 | ITQ:MNLKYAISAKNRART | | | | | |
| (2718) | DEPENDENT_ | | :VA | | | | | |
| | RNA_ | | | | | | | |
| | POLYMERASE | | | | | | | |
| | (SEQ ID NO: | | | | | | | |
| | 1708) | | | | | | | |

[0109] In aspects, the instant disclosure is directed to a peptide or polypeptide comprising, consisting, or consisting essentially of an amino acid sequence of SEQ ID NOS: 4-1676, 1713-2595, 2605-2638, 2647-2718, and 2735-8692 (and/or fragments or variants thereof), and optionally 1 to 12 additional amino acids distributed in any ratio on the N terminus and/or C-terminus of the polypeptide of SEQ ID NOS: 4-1676, 1713-2595, 2605-2638, 2647-2718, and 2735-8692. In aspects, the instant disclosure is directed to a peptide or polypeptide have a core amino acid sequence comprising, consisting of, or consisting essentially of one or more peptides or polypeptides having an amino acid sequence of SEQ ID NOS: 4-1676, 1713-2595, 2605-2638, 2647-2718, and 2735-8692 (and/or fragments or variants thereof), and optionally having extensions of 1 to 12 amino acids on the C-terminal and/or the N-terminal of the core amino acid sequence, wherein the overall number of these flanking amino acids is 1 to 12, 1 to 3, 2 to 4, 3 to 6, 1 to 10, 1 to 8, 1 to 6, 2 to 12, 2 to 10, 2 to 8, 2 to 6, 3 to 12, 3 to 10, 3 to 8, 3 to 6, 4 to 12, 4 to 10, 4 to 8, 4 to 6, 5 to 12, 5 to 10, 5 to 8, 5 to 6, 6 to 12, 6 to 10, 6 to 8, 7 to 12, 7 to 10, 7 to 8, 8 to 12, 8 to 10, 9 to 12, 9 to 10, or 10 to 12, wherein the flanking amino acids can be distributed in any ratio to the C-terminus and the N-terminus (for example all flanking amino acids can be added to one terminus, or the amino acids can be added equally to both termini or in any other ratio). In aspects, the instant disclosure is directed to a peptide or polypeptide have a core sequence comprising, consisting of, or consisting essentially of one or more peptides or polypeptides having an amino acid sequence of SEQ ID NOS: 4-1676, 1713-2595, 2605-2638, 2647-2718, and 2735-8692 (and/or fragments and variants thereof), optionally with extensions of 1 to 12 amino acids on the C-terminal and/or the N-terminal, wherein the overall number of these flanking amino acids is 1 to 12, 1 to 3, 2 to 4, 3 to 6, 1 to 10, 1 to 8, 1 to 6, 2 to 12, 2 to 10, 2 to 8, 2 to 6, 3 to 12, 3 to 10, 3 to 8, 3 to 6, 4 to 12, 4 to 10, 4 to 8, 4 to 6, 5 to 12, 5 to 10, 5 to 8, 5 to 6, 6 to 12, 6 to 10, 6 to 8, 7 to 12, 7 to 10, 7 to 8, 8 to 12, 8 to 10, 9 to 12, 9 to 10, or 10 to 12, wherein the flanking amino acids can be distributed in any ratio to the C-terminus and the N-terminus (for example all flanking amino acids can be added to one terminus, or the amino acids can be added equally to both termini or in any other ratio), provided that the polypeptide with the flanking amino acids is still able to bind to the same HLA molecule (i.e., retain MHC binding propensity) as said polypeptide core sequence without said flanking amino acids. In aspects, said polypeptide with the flanking amino acids is still able to bind to the same HLA molecule (i.e., retain WIC binding propensity) and/or retain the same TCR specificity, and/or retain anti-SARS-CoV-2 activity, as said polypeptide core sequence without said flanking amino acids. In aspects, the extension(s) may serve and be designed to improve the biochemical properties of the peptides or polypeptides (e.g., but not limited to, solubility or stability) or to improve the likelihood for efficient proteasomal processing of the peptide. In aspects, the polypeptides of the present disclosure may be islated, synthetic, and/or recombinant, and may comprise post-transcriptional modifications such as glycosylation, added chemical groups, etc. In aspects, said flanking amino acid sequences are those that also flank the peptides or polypeptides included therein in the naturally occurring protein (for example, as found in SARS-CoV-2 Wuhan-Hu-1 (GenBank id: MN908947), which was selected as the reference strain). In aspects, said flanking amino acid sequences are those that also flank the peptides or polypeptides included therein in the naturally occurring protein, for example, as described below:
[0110] For a peptide or polypeptide have a core sequence comprising, consisting of, or consisting essentially of one or more peptides or polypeptides having an amino acid sequence of SEQ ID NOS: 4-68, 1003-1005, 708-739, 1055-1059, 1366-1370, 2735-2792, or 8588 (and/or fragments and variants thereof), optionally with extensions of 1 to 12 amino acids on the C-terminal and/or the N-terminal, the extensions of 1 to 12 amino acids are those found flanking the amino acid sequence of SEQ ID NOS: 4-68, 1003-1005, 708-739, 1055-1059, 1366-1370, 2735-2792, or 8588 in the amino acid sequence of the envelope (SEQ ID NO: 1) of SARS-CoV-2.
[0111] For a peptide or polypeptide have a core sequence comprising, consisting of, or consisting essentially of one or more peptides or polypeptides having an amino acid sequence of SEQ ID NOS: 69-209, 1006-1015, 740-851, 1060-1072, 1118-1119, 1371-1383, 1429-1430, 2255, 2561, 2793-2966, 8568, 8587, 8590, 8691, or 8692 (and/or fragments and variants thereof), optionally with extensions of 1 to 12 amino acids on the C-terminal and/or the N-terminal, the extensions of 1 to 12 amino acids are those found flanking the amino acid sequence of SEQ ID NOS: 69-213, 1006-1015, 740-851, 1060-1072, 1118-1119, 1371-1383, 1429-1430, 2793-2966, 8568, 8587, 8590, 8691, or 8692 in the amino acid sequence of the membrane (SEQ ID NO: 2) of SARS-CoV-2.
[0112] For a peptide or polypeptide have a core sequence comprising, consisting of, or consisting essentially of one or more peptides or polypeptides having an amino acid sequence of SEQ ID NOS: 210-707, 1016-1054, 852-1002, 1073-1117, 1120-1123, 1384-1428, 1431-1434, 1782-1800, 1975-1984, 2568, 2569, 2590, 2647-2676, 2701-2704, 7810-8540, 8543, 8553, 8555, 8583, 8599, 8609, 8613, 8617, 8620, 8652, 8654, 8670, 8675, 8686, or 8690 (and/or fragments and variants thereof), optionally with extensions of 1 to 12 amino acids on the C-terminal and/or the N-terminal, the extensions of 1 to 12 amino acids are those found flanking the amino acid sequence of SEQ ID NOS: 210-707, 1016-1054, 852-1002, 1073-1117, 1120-1123, 1384-1428, 1431-1434, 1782-1800, 1975-1984, 2568, 2569, 2590, 2647-2676, 2701-2704, 7810-8540, 8543, 8553, 8555, 8583, 8599, 8609, 8613, 8617, 8620, 8652, 8654, 8670, 8675, 8686, or 8690 in the amino acid sequence of the spike (SEQ ID NO: 3) of SARS-CoV-2.
[0113] For a peptide or polypeptide have a core sequence comprising, consisting of, or consisting essentially of one or more peptides or polypeptides having an amino acid sequence of SEQ ID NOS: 1124-1128 1435-1439, 2705-2706, 2967-3140, 8556, 8594, 8607, 8642, or 8655 (and/or fragments and variants thereof), optionally with extensions of 1 to 12 amino acids on the C-terminal and/or the N-terminal, the extensions of 1 to 12 amino acids are those found flanking the amino acid sequence of SEQ ID NOS: 1124-1128, 1435-1439, 2705-2706, 2967-3140, 8556, 8594, 8607, 8642, or 8655 in the amino acid sequence of the nucleocapsid (SEQ ID NO: 1693) of SARS-CoV-2.
[0114] For a peptide or polypeptide have a core sequence comprising, consisting of, or consisting essentially of one or more peptides or polypeptides having an amino acid sequence of SEQ ID NOS: 1129-1139, 1440-1450, 2677-2678, 2707-2710, 7397-7610, 8566, 8575, 8625, 8635, or 8683 (and/or fragments and variants thereof), optionally with extensions of 1 to 12 amino acids on the C-terminal and/or the N-terminal, the extensions of 1 to 12 amino acids are those found flanking the amino acid sequence of SEQ ID NOS: 1129-1139, 1440-1450, 2677-2678, 2707-2710, 7397-7610, 8566, 8575, 8625, 8635, or 8683 in the amino acid sequence of the ORF3a protein (SEQ ID NO: 1694) of SARS-CoV-2.
[0115] For a peptide or polypeptide have a core sequence comprising, consisting of, or consisting essentially of one or more peptides or polypeptides having an amino acid sequence of SEQ ID NOS: 1140-1141, 1451-1452, 7611-7657, 8548, or 8787 (and/or fragments and variants thereof), optionally with extensions of 1 to 12 amino acids on the C-terminal and/or the N-terminal, the extensions of 1 to 12 amino acids are those found flanking the amino acid sequence of SEQ ID NOS: 1140-1141, 1451-1452, 7611-7657, 8548, or 8787 in the amino acid sequence of the ORF6 protein (SEQ ID NO: 1695) of SARS-CoV-2.
[0116] For a peptide or polypeptide have a core sequence comprising, consisting of, or consisting essentially of one or more peptides or polypeptides having an amino acid sequence of SEQ ID NOS: 1142-1145, 1453-1456, or 7658-7746 (and/or fragments and variants thereof), optionally with extensions of 1 to 12 amino acids on the C-terminal and/or the N-terminal, the extensions of 1 to 12 amino acids are those found flanking the amino acid sequence of SEQ ID NOS: 1142-1145, 1453-1456, or 7658-7746 in the amino acid sequence of the ORF7a protein (SEQ ID NO: 1696) of SARS-CoV-2.
[0117] For a peptide or polypeptide have a core sequence comprising, consisting of, or consisting essentially of one or more peptides or polypeptides having an amino acid sequence of SEQ ID NOS: 1146-1148, 1457-1459, 7747-7809, 8662, or 8668 (and/or fragments and variants thereof), optionally with extensions of 1 to 12 amino acids on the C-terminal and/or the N-terminal, the extensions of 1 to 12 amino acids are those found flanking the amino acid sequence of SEQ ID NOS: 1146-1148, 1457-1459, 7747-7809, 8662, or 8668 in the amino acid sequence of the ORF8 protein (SEQ ID NO: 1697) of SARS-CoV-2.
[0118] For a peptide or polypeptide have a core sequence comprising, consisting of, or consisting essentially of one or more peptides or polypeptides having an amino acid sequence of SEQ ID NOS: 1149-1150, 1460-1461, or 3140-3169 (and/or fragments and variants thereof), optionally with extensions of 1 to 12 amino acids on the C-terminal and/or the N-terminal, the extensions of 1 to 12 amino acids are those found flanking the amino acid sequence of SEQ ID NOS: 1149-1150, 1460-1461, or 3140-3169 in the amino acid sequence of the ORF10 protein (SEQ ID NO: 1698) of SARS-CoV-2.
[0119] For a peptide or polypeptide have a core sequence comprising, consisting of, or consisting essentially of one or more peptides or polypeptides having an amino acid sequence of SEQ ID NOS: 1151-1169, 1462-1480, 4447-4798, 8549, 8552, 8612, 8659, 8661, 8663, 8664, 8684,or 8685 (and/or fragments and variants thereof), optionally with extensions of 1 to 12 amino acids on the C-terminal and/or the N-terminal, the extensions of 1 to 12 amino acids are those found flanking the amino acid sequence of SEQ ID NOS: 1151-1169, 1462-1480, 4447-4798, 8549, 8552, 8612, 8659, 8661, 8663, 8664, 8684,or 8685 in the amino acid sequence of the ORF1ab non-structural protein 2 (NSP2) (SEQ ID NO: 1699) of SARS-CoV-2.
[0120] For a peptide or polypeptide have a core sequence comprising, consisting of, or consisting essentially of one or more peptides or polypeptides having an amino acid sequence of SEQ ID NOS: 1170-1236, 1481-1547,1985-1998, 2591, 2679-2688, 2711-2712, 4799-5969, 8542, 8545, 8547, 8560, 8564, 8567, 8569, 8570, 8589, 8591, 8598, 8600, 8603, 8608, 8610, 8616, 8618, 8629, 8630, 8633, 8639, 8649, 8650, 8665-8668, 8671, or 8681 (and/or fragments and variants thereof), optionally with extensions of 1 to 12 amino acids on the C-terminal and/or the N-terminal, the extensions of 1 to 12 amino acids are those found flanking the amino acid sequence of SEQ ID NOS: 1170-1236 1481-1547, 1985-1998, 2591, 2679-2688, 2711-2712, 4799-5969, 8542, 8545, 8547, 8560, 8564, 8567, 8569, 8570, 8589, 8591, 8598, 8600, 8603, 8608, 8610, 8616, 8618, 8629, 8630, 8633, 8639, 8649, 8650, 8665-8668, 8671, or 8681 in the amino acid sequence of the ORF1ab non-structural protein 3 (NSP3) (SEQ ID NO: 1700) of SARS-CoV-2.
[0121] For a peptide or polypeptide have a core sequence comprising, consisting of, or consisting essentially of one or more peptides or polypeptides having an amino acid sequence of SEQ ID NOS: 1237-1254, 1548-1565, 1812-1830, 1913-1927, 2571, 2572, 2583, 2689-2690, 2713-2714, 5970-6334, 8571, 8578, 8580-8582, 8606, 8632, 8634, or 8677 (and/or fragments and variants thereof), optionally with extensions of 1 to 12 amino acids on the C-terminal and/or the N-terminal, the extensions of 1 to 12 amino acids are those found flanking the amino acid sequence of SEQ ID NOS: 1237-1254, 1548-1565, 1812-1830, 1913-1927, 2571, 2572, 2583, 2689-2690, 2713-2714, 5970-6334, 8571, 8578, 8580-8582, 8606, 8632, 8634, or 8677 in the amino acid sequence of the ORF1ab non-structural protein 4 (NSP4) (SEQ ID NO: 1701) of SARS-CoV-2.
[0122] For a peptide or polypeptide have a core sequence comprising, consisting of, or consisting essentially of one or more peptides or polypeptides having an amino acid sequence of SEQ ID NOS: 1255-1259, 1566-1570, 1999-2010, 2592, 2697-2698, 3170-3342, or 8574 (and/or fragments and variants thereof), optionally with extensions of 1 to 12 amino acids on the C-terminal and/or the N-terminal, the extensions of 1 to 12 amino acids are those found flanking the amino acid sequence of SEQ ID NOS: 1255-1259, 1566-1570, 1999-2010, 2592, 2697-2698, 3170-3342, or 8574 in the amino acid sequence of the ORF1ab 3C-like proteinase (SEQ ID NO: 1702) of SARS-CoV-2.
[0123] For a peptide or polypeptide have a core sequence comprising, consisting of, or consisting essentially of one or more peptides or polypeptides having an amino acid sequence of SEQ ID NOS: 1260-1274, 1571-1585, 1742-1755, 2715-2716, 6335-6598, 8561, 8577, 8615, 8621, 8623, 8627, 8638, or 8647 (and/or fragments and variants thereof), optionally with extensions of 1 to 12 amino acids on the C-terminal and/or the N-terminal, the extensions of 1 to 12 amino acids are those found flanking the amino acid sequence of SEQ ID NOS: 1260-1274, 1571-1585, 1742-1755, 2715-2716, 6335-6598, 8561, 8577, 8615, 8621, 8623, 8627, 8638, or 8647 in the amino acid sequence of the ORF1ab non-structural protein 6 (NSP6) (SEQ ID NO: 1703) of SARS-CoV-2.
[0124] For a peptide or polypeptide have a core sequence comprising, consisting of, or consisting essentially of one or more peptides or polypeptides having an amino acid sequence of SEQ ID NOS: 1275-1276, 1586-1587, 6599-6636, or 8682 (and/or fragments and variants thereof), optionally with extensions of 1 to 12 amino acids on the C-terminal and/or the N-terminal, the extensions of 1 to 12 amino acids are those found flanking the amino acid sequence of SEQ ID NOS: 1275-1276, 1586-1587, 6599-6636, or 8682 in the amino acid sequence of the ORF1ab non-structural protein 7 (NSP7) (SEQ ID NO: 1704) of SARS-CoV-2.
[0125] For a peptide or polypeptide have a core sequence comprising, consisting of, or consisting essentially of one or more peptides or polypeptides having an amino acid sequence of SEQ ID NOS: 1277-1283, 1588-1594, 1772-1781, 2567, 2691-2692, 6637-6739, 8585, 8593, 8611, 8619, 8657, or 8669 (and/or fragments and variants thereof), optionally with extensions of 1 to 12 amino acids on the C-terminal and/or the N-terminal, the extensions of 1 to 12 amino acids are those found flanking the amino acid sequence of SEQ ID NOS: 1277-1283, 1588-1594, 1772-1781, 2567, 2691-2692, 6637-6739, 8585, 8593, 8611, 8619, 8657, or 8669 in the amino acid sequence of the ORF1ab non-structural protein 8 (NSP8) (SEQ ID NO: 1705) of SARS-CoV-2.
[0126] For a peptide or polypeptide have a core sequence comprising, consisting of, or consisting essentially of one or more peptides or polypeptides having an amino acid sequence of SEQ ID NOS: 1284-1288, 1595-1599, 1890-1897, 2580, 6740-6789, 8558, or 8628 (and/or fragments and variants thereof), optionally with extensions of 1 to 12 amino acids on the C-terminal and/or the N-terminal, the extensions of 1 to 12 amino acids are those found flanking the amino acid sequence of SEQ ID NOS: 1284-1288, 1595-1599, 1890-1897, 2580, 6740-6789, 8558, or 8628 in the amino acid sequence of the ORF1ab non-structural protein 9 (NSP9) (SEQ ID NO: 1706) of SARS-CoV-2.
[0127] For a peptide or polypeptide have a core sequence comprising, consisting of, or consisting essentially of one or more peptides or polypeptides having an amino acid sequence of SEQ ID NOS: 1289, 1600, or 4390-4446 (and/or fragments and variants thereof), optionally with extensions of 1 to 12 amino acids on the C-terminal and/or the N-terminal, the extensions of 1 to 12 amino acids are those found flanking the amino acid sequence of SEQ ID NOS: 1289, 1600, or 4390-4446 in the amino acid sequence of the ORF1 ab non-structural protein 10 (NSP10) (SEQ ID NO: 1707) of SARS-CoV-2.
[0128] For a peptide or polypeptide have a core sequence comprising, consisting of, or consisting essentially of one or more peptides or polypeptides having an amino acid sequence of SEQ ID NOS: 1290-1315, 1601-1626, 1723-1741, 1756-1771, 1802-1811, 1860-1877, 2563, 2564, 2566, 2570, 2717-2718, 6790-7396, 8541, 8544, 8546, 8550, 8559, 8565, 8579, 8584, 8595, 8596, 8601, 8602, 8605, 8614, 8622, 8624, 8626, 8636, 8643, 8645, 8648, 8658, 8660, or 8674 (and/or fragments and variants thereof), optionally with extensions of 1 to 12 amino acids on the C-terminal and/or the N-terminal, the extensions of 1 to 12 amino acids are those found flanking the amino acid sequence of SEQ ID NOS: 1290-1315, 1601-1626, 1723-1741, 1756-1771, 1802-1811, 1860-1877, 2563, 2564, 2566, 2570, 2717-2718, 6790-7396, 8541, 8544, 8546, 8550, 8559, 8565, 8579, 8584, 8595, 8596, 8601, 8602, 8605, 8614, 8622, 8624, 8626, 8636, 8643, 8645, 8648, 8658, 8660, or 8674 in the amino acid sequence of the ORF1ab RNA-dependent RNA polymerase protein (SEQ ID NO: 1708) of SARS-CoV-2.
[0129] For a peptide or polypeptide have a core sequence comprising, consisting of, or consisting essentially of one or more peptides or polypeptides having an amino acid sequence of SEQ ID NOS: 1316-1334, 1627-1645, 1898-1912, 1939-1963, 2582, 2586, 2693-2696, 3839-4179, 8572, 8641, 8646, 8651, or 8676 (and/or fragments and variants thereof), optionally with extensions of 1 to 12 amino acids on the C-terminal and/or the N-terminal, the extensions of 1 to 12 amino acids are those found flanking the amino acid sequence of SEQ ID NOS: 1316-1334, 1627-1645, 1898-1912, 1939-1963, 2582, 2586, 2693-2696, 3839-4179, 8572, 8641, 8646, 8651, or 8676 in the amino acid sequence of the ORF1ab helicase protein (SEQ ID NO: 1709) of SARS-CoV-2.
[0130] For a peptide or polypeptide have a core sequence comprising, consisting of, or consisting essentially of one or more peptides or polypeptides having an amino acid sequence of SEQ ID NOS: 1335-1344, 1646-1655, 1831-1859, 1964-1974, 2573, 2574, 2575, 2588, 2589, 3343-3661, 8554, 8557, 8563, 8573, 8576, 8586, 8592, 8597, 8631, 8640, 8644, 8653, or 8672 (and/or fragments and variants thereof), optionally with extensions of 1 to 12 amino acids on the C-terminal and/or the N-terminal, the extensions of 1 to 12 amino acids are those found flanking the amino acid sequence of SEQ ID NOS: 1335-1344, 1646-1655, 1831-1859, 1964-1974, 2573, 2574, 2575, 2588, 2589, 3343-3661, 8554, 8557, 8563, 8573, 8576, 8586, 8592, 8597, 8631, 8640, 8644, 8653, or 8672 in the amino acid sequence of the ORF1 ab 3′-5′ exonuclease protein (SEQ ID NO: 1710) of SARS-CoV-2.
[0131] For a peptide or polypeptide have a core sequence comprising, consisting of, or consisting essentially of one or more peptides or polypeptides having an amino acid sequence of SEQ ID NOS: 1345-1352, 1656-1663, 3362-3838, 8551, 8562, 8637, or 8680 (and/or fragments and variants thereof), optionally with extensions of 1 to 12 amino acids on the C-terminal and/or the N-terminal, the extensions of 1 to 12 amino acids are those found flanking the amino acid sequence of SEQ ID NOS: 1345-1352, 1656-1663, 3362-3838, 8551, 8562, 8637, or 8680 in the amino acid sequence of the ORF1ab endoRNase protein (SEQ ID NO: 1711) of SARS-CoV-2.
[0132] For a peptide or polypeptide have a core sequence comprising, consisting of, or consisting essentially of one or more peptides or polypeptides having an amino acid sequence of SEQ ID NOS: 1353-1365, 1664-1676, 1713-1722, 1878-1889,1928-1938, 2578, 2579, 2584, 2699-2700, 4180-4389, 8604, 8656, 8673, 8678, or 8679 (and/or fragments and variants thereof), optionally with extensions of 1 to 12 amino acids on the C-terminal and/or the N-terminal, the extensions of 1 to 12 amino acids are those found flanking the amino acid sequence of SEQ ID NOS: 1353-1365, 1664-1676, 1713-1722, 1878-1889, 1928-1938, 2578, 2579, 2584, 2699-2700, 4180-4389, 8604, 8656, 8673, 8678, or 8679 in the amino acid sequence of the ORF1ab 2′O-ribose methyltransferase protein (SEQ ID NO: 1712) of SARS-CoV-2.

[0133] In aspects, said flanking amino acid sequences as described herein may serve as a WIC stabilizing region. The use of a longer peptide may allow endogenous processing by patient cells and may lead to more effective antigen presentation and induction of T cell responses. In aspects, the peptides or polypeptides of the instant disclosure can be isolated, recombinant, and/or synthetic. In aspects, the peptides or polypeptides can be either in neutral (uncharged) or salt forms, and may be either free of or include modifications such as glycosylation, side chain oxidation, or phosphorylation. In aspects, the peptides or polypeptides of the instant disclosure can be capped with an n-terminal acetyl and/or c-terminal amino group.

[0134] In aspects, the instant disclosure is directed to one or more Class II polypeptides (“clusters”) of Table 1, (and/or fragments or variants thereof), and optionally 1 to 12 additional amino acids distributed in any ratio on the N terminus and/or C-terminus of a polypeptide of Table 1.

[0135] In aspects, the instant disclosure is directed to one or more Class II polypeptides (“clusters”) comprising, consisting, or consisting essentially of an amino acid sequence of SEQ ID NOS: 1091, 1401, 1062, 1373, 1085, 1395, 1066, 1376, 1080, 1391, 1081, 1392, 1065, 1376, 1092, 1403, 1104, 1415, 1071, 1382, 1107, 1418, 1072, 1383, 1074, 1384, 1115, 1426, 1096, 1407, 1110, 1421, 1116, 1427, 1105, 1416, 1055, 1366, 1070, and 1381 (and/or fragments or variants thereof), and optionally 1 to 12 additional amino acids distributed in any ratio on the N terminus and/or C-terminus of the polypeptide of SEQ ID NOS: 1091, 1401, 1062, 1373, 1085, 1395, 1066, 1376, 1080, 1391, 1081, 1392, 1065, 1376, 1092, 1403, 1104, 1415, 1071, 1382, 1107, 1418, 1072, 1383, 1074, 1384, 1115, 1426, 1096, 1407, 1110, 1421, 1116, 1427, 1105, 1416, 1055, 1366, 1070, and 1381.

[0136] In aspects, the instant disclosure is directed to one or more Class II polypeptides (“clusters”) comprising, consisting, or consisting essentially of an amino acid sequence of SEQ ID NOS: 1055, 1366, 1060, 1371, 1061, 1372, 1062, 1373, 1065, 1376, 1066, 1376, 1069, 1380, 1070, 1381, 1071 1382, 1072, 1383, 1074, 1384, 1078, 1389, 1080, 1391, 1081, 1392, 1082, 1393, 1085, 1395, 1086 1397, 1087, 1398, 1088, 1399, 1089, 1400, 1091, 1401, 1092, 1403, 1093, 1404, 1096, 1407, 1100 1411, 1104, 1415, 1105, 1416, 1106, 1417, 1107, 1418, 1110, 1421, 1113, 1424, 1115, 1426, 1116, and 1427 (and/or fragments or variants thereof), and optionally 1 to 12 additional amino acids distributed in any ratio on the N terminus and/or C-terminus of the polypeptide of SEQ ID NOS: 1055, 1366, 1060, 1371, 1061, 1372, 1062, 1373, 1065, 1376, 1066, 1376, 1069, 1380, 1070, 1381, 1071 1382, 1072, 1383, 1074, 1384, 1078, 1389, 1080, 1391, 1081, 1392, 1082, 1393, 1085, 1395, 1086 1397, 1087, 1398, 1088, 1399, 1089, 1400, 1091, 1401, 1092, 1403, 1093, 1404, 1096, 1407, 1100 1411, 1104, 1415, 1105, 1416, 1106, 1417, 1107, 1418, 1110, 1421, 1113, 1424, 1115, 1426, 1116, and 1427. Optionally, such peptides or polypeptides may be used/administered in the instantly-disclosed vaccines and related methods as “peptide pools”, as disclosed in Example 8 and Tables 61 and 62.

[0137] In aspects, the instant disclosure is directed to one or more Class II polypeptides (“clusters”) comprising, consisting, or consisting essentially of an amino acid sequence of SEQ ID NOS: 1062 1373, 1066. 1377, 1079, 1390, 1080, 1391, 1085, 1396, 1124, 1435, 1127, 1438, 1132, 1443, 1134, 1445, 1136, 1447, 2677, 2678, 1140, 1451, 1148, 1459, 1184, 1495, 1185, 1496, 1197, 1507, 1203, 1514, 2679, 2680, 2681, 2682, 1220, 1531, 1222, 1533, 1223, 1534, 2683, 2684, 1234, 1555, 2689, 3690, 1247, 1558, 1250, 1561, 1254, 1565, 2697, 2698, 1261, 1571, 1267, 1578, 1268, 1579, 1270, 1581, 1273, 1584, 1293, 1604, 1300, 1611, 1309, 1619, 1311, 1622, 1314, 1625, 1319, 1630, 2693, 2694, 1333, 1644, 2695, 2696, 1335, 1646, 1337, 1648, 1344, 1655, 1348, 1659, 1351, 1662, 1363 1674, 1365 and 1676 (and/or fragments or variants thereof), and optionally 1 to 12 additional amino acids distributed in any ratio on the N terminus and/or C-terminus of the polypeptide of SEQ ID NOS: 1062, 1373, 1066, 1377, 1079, 1390, 1080, 1391, 1085, 1396, 1124, 1435, 1127, 1438, 1132, 1443, 1134, 1445, 1136, 1447, 2677, 2678, 1140, 1451, 1148, 1459, 1184, 1495, 1185, 1496, 1197, 1507, 1203, 1514, 2679, 2680, 2681, 2682, 1220, 1531, 1222, 1533, 1223, 1534, 2683, 2684, 1234, 1555, 2689, 3690, 1247, 1558, 1250, 1561, 1254, 1565, 2697, 2698, 1261, 1571, 1267, 1578, 1268, 1579, 1270, 1581, 1273, 1584, 1293, 1604, 1300, 1611, 1309, 1619, 1311, 1622, 1314, 1625, 1319, 1630, 2693, 2694, 1333, 1644, 2695, 2696, 1335, 1646, 1337, 1648, 1344, 1655, 1348, 1659, 1351, 1662, 1363 1674, 1365 and 1676. In aspects, such polypeptides may be used/delivered via a micro needle patch, as are known in the art.

[0138] In aspects, the instant disclosure is directed to one or more Class II polypeptides (“clusters”) comprising, consisting, or consisting essentially of an amino acid sequence of SEQ ID NOS: 2647, 2648, 2649, 2650, 2651, 2652, 2653, 2654, 2655, 2656, 2657, 2658, 2659, 2660, 2661, 2662, 1092, 1403, 2663, 2664, 1093, 1404, 2665, 2666, 2667, 2668, 2669, 2670, 2671, 2672, 1098, 1409, 2673, and 2674 (and/or fragments or variants thereof), and optionally 1 to 12 additional amino acids distributed in any ratio on the N terminus and/or C-terminus of the polypeptide of SEQ ID NOS: 2647, 2648, 2649, 2650, 2651, 2652, 2653, 2654, 2655, 2656, 2657, 2658, 2659, 2660, 2661, 2662, 1092, 1403, 2663, 2664, 1093, 1404, 2665, 2666, 2667, 2668, 2669, 2670, 2671, 2672, 1098, 1409, 2673, and 2674.

[0139] In aspects, the instant disclosure is directed to one or more Class II polypeptides (“clusters”) comprising, consisting, or consisting essentially of an amino acid sequence of SEQ ID NOS: 1071, 1382, 1087, 1398, 2675, 2676, 1124, 1435, 1155, 1466, 1170, 1481, 1174, 1485, 1181, 1492, 1190, 1501, 1192, 1503, 1193, 1504, 2687, 2688, 2685, 2686, 1240, 1551, 1253, 1564, 1255, 1566, 1262, 1573, 1267, 1578, 2691, 2692, 1295, 1606, 1310, 1621, 1344, 1655, 1348, 1659, 1352, 1663, 2699, and 2700 (and/or fragments or variants thereof), and optionally 1 to 12 additional amino acids distributed in any ratio on the N terminus and/or C-terminus of the polypeptide of SEQ ID NOS: 1071, 1382, 1087, 1398, 2675, 2676, 1124, 1435, 1155, 1466, 1170, 1481, 1174, 1485, 1181, 1492, 1190, 1501, 1192, 1503, 1193, 1504, 2687, 2688, 2685, 2686, 1240, 1551, 1253, 1564, 1255, 1566, 1262, 1573, 1267, 1578, 2691, 2692, 1295, 1606, 1310, 1621, 1344, 1655, 1348, 1659, 1352, 1663, 2699, and 2700.

[0140] In aspects, the instant disclosure is directed to one or more Class I polypeptides (9-mers or lOmers) comprising, consisting, or consisting essentially of an amino acid sequence of SEQ ID NOS: 2735-8540 (and/or fragments or variants thereof), and optionally 1 to 12 additional amino acids distributed in any ratio on the N terminus and/or C-terminus of the polypeptide of SEQ ID NOS: 2735-8540.

[0141] In aspects, the instant disclosure is directed to one or more Class I polypeptides (9-mers) comprising, consisting, or consisting essentially of an amino acid sequence of SEQ ID NOS: 8541-8690 (and/or fragments or variants thereof), and optionally 1 to 12 additional amino acids distributed in any ratio on the N terminus and/or C-terminus of the polypeptide of SEQ ID NOS: 8541-8690. In aspects, such polypeptides may be used/delivered via a micro needle patch, as are known in the art.

[0142] In aspects, the instant disclosure is directed to a polypeptide comprising an amino acid sequence having at least 75%, 80%, 85%, 90%, or 95% homology to any one of SEQ ID NOS: 4-1676, 1713-2595, 2605-2638, 2647-2718, and 2735-8692 (and/or fragments thereof), wherein said polypeptide is still able to bind to a same HLA molecule (i.e., retain MHC binding propensity) and/or retain the same TCR specificity, and/or retain anti-SARS-CoV-2 activity.

[0143] In aspects, the present disclosure is directed to a concatemeric polypeptide or peptide that comprises at one or more of the instantly-disclosed polypeptides or peptides (e.g., but not limited to, a peptide or polypeptide comprising, consisting, or consisting essentially of an amino acid sequence of SEQ ID NOS: 4-1676, 1713-2595, 2605-2638, 2647-2718, and 2735-8692 (and/or fragments or variants thereof), and optionally 1 to 12 additional amino acids distributed in any ratio on the N terminus and/or C-terminus of the polypeptide of SEQ ID NOS: 4-1676, 1713-2595, 2605-2638, 2647-2718, and 2735-8692) linked, fused, or joined together (e.g., fused in-frame, chemically-linked, or otherwise bound) to an additional peptide or polypeptide. Such additional peptide or polypeptide may be one or more of the instantly instantly-disclosed polypeptides or peptides, or may be an additional peptide or polypeptide of interest. In aspects, a concatemeric peptide is composed of 3 or more, 4 or more, 5 or more 6 or more 7 or more, 8 or more, 9 or more of the instantly-disclosed peptides or polypeptides. In other aspects, the concatemeric peptides or polypeptides include 1000 or more, 1000 or less, 900 or less, 500 or less, 100 or less, 75 or less, 50 or less, 40 or less, 30 or less, 20 or less or 100 or less peptide epitopes. In yet other embodiments, a concatemeric peptide has 3-100, 5-100, 10-100, 15-100, 20-100, 25-100, 30-100, 35-100, 40-100, 45-100, 50-100, 55-100, 60-100, 65-100, 70-100, 75-100, 80-100, 90-100, 5-50, 10-50, 15-50, 20-50, 25-50, 30-50, 35-50, 40-50, 45-50, 100-150, 100-200, 100-300, 100-400, 100-500, 50-500, 50-800, 50-1,000, or 100-1,000 of the instantly-disclosed peptides or polypeptides linked, fused, or joined together. Each peptide or polypeptide of the concatemeric polypeptide may optionally have one or more linkers, which may optionally be cleavage sensitive sites, adjacent to their N and/or C terminal end. Such suitable linkers and cleavage sensitive sites, including AAY cleavage motifs or a poly GS linker which may be include on the N terminus of the C-terminal element, are known in the art. In such a concatemeric peptide, two or more of the peptide epitopes may have a linker, which may act as a cleavage sensitive site, between them. Alternatively two or more of the peptide epitopes may be connected directly to one another or through a linker that is not a cleavage sensitive site. In aspects, such linker is antigenically neutral, and the liker is preferably less than the length of a peptidyl backbone of 9 amino acids linearly arranged. In aspects, linker length is the length of a peptidyl backbone of between 2 and 8 amino acids, linearly arranged. In aspects, the spacer is unable to hydrogen bond in any spatially distinct manner to other distinct elements of the enhancing hybrid peptide.

[0144] In aspects, and with respect to antigenically neutral linker elements, various chemical groups may be incorporated as linkers instead of amino acids. Examples are described in U.S. Pat. No. 5,910,300, the contents of which are incorporated herein by reference. In apsects, a linker may be comprised of an aliphatic chain optimally interrupted by heteroatoms, for example a C₂-C₆ alkylene, or ═N—(CH₂)₂₋₆—N═. Alternatively, a spacer may be composed of alternating units, for example of hydrophobic, lipophilic, aliphatic and aryl-aliphatic sequences, optionally interrupted by heteroatoms such as O, N, or S. Such components of a spacer are preferably chosen from the following classes of compounds: sterols, alkyl alcohols, polyglycerides with varying alkyl functions, alkyl-phenols, alkyl-amines, amides, hydroxyphobic polyoxyalkylenes, and the like. Other examples are hydrophobic polyanhydrides, polyorthoesters, polyphosphazenes, polyhydroxy acids, polycaprolactones, polylactic, polyglycolic polyhydroxy-butyric acids. A linker may also contain repeating short aliphatic chains, such as polypropylene, isopropylene, butylene, isobutylene, pentamethlyene, and the like, separated by oxygen atoms.

[0145] Additional peptidyl sequences which can be used in as possible linkers are described in U.S. Pat. No. 5,856,456, the contents of which are incorporated herein by reference. In one embodiment, a linker has a chemical group incorporated within which is subject to cleavage. Without limitation, such a chemical group may be designed for cleavage catalyzed by a protease, by a chemical group, or by a catalytic monoclonal antibody. In the case of a protease-sensitive chemical group, tryptic targets (two amino acids with cationic side chains), chymotryptic targets (with a hydrophobic side chain), and cathepsin sensitivity (B, D or S) are favored. The term ‘tryptic target’ is used herein to describe sequences of amino acids which are recognized by trypsin and trypsin-like enzymes. The term chymotryptic target' is used herein to describe sequences of amino acids which are recognized by chymotrypsin and chymotrypsin-like enzymes. In addition, chemical targets of catalytic monoclonal antibodies, and other chemically cleaved groups are well known to persons skilled in the art of peptide synthesis, enzymatic catalysis, and organic chemistry in general, and can be designed into the hybrid structure and synthesized, using routine experimental methods.

[0146] In aspects, a concatemeric polypeptide of the instant disclosure is produced using the EpiAssembler System (EpiVax). The EpiAssembler system is useful for assembling overlapping epitopes to Immunogenic Consensus Sequences (ICS). EpiAssembler is an algorithm that optimizes the balance between pathogen and population coverage. EpiAssembler uses the information from the sequences produced by Conservatrix and EpiMatrix to form highly immunogenic consensus sequences. In aspects, the concatemeric peptides of the instant disclosure include those of SEQ ID NOS: 1677-1692, 2593-2604, 2639-2646, and 2719-2734 (as well as nucleic acids (e.g., RNA mRNA, DNA, cDNA) encoding such concatemeric peptides). In aspects, the concatemeric peptides of the instant disclosure include one or more of SEQ ID NOS: 1677-1681 and 2641-2646 (as well as nucleic acids (e.g., RNA mRNA, DNA, cDNA) encoding such concatemeric peptides). In aspects, the concatemeric peptides of the instant disclosure include one or more of SEQ ID NOS: 2723-2734 (as well as nucleic acids (e.g., RNA mRNA, DNA, cDNA) encoding such concatemeric peptides). In aspects, the concatemeric peptides of the instant disclosure include one or more of SEQ ID NOS: 2639-2640 (as well as nucleic acids (e.g., RNA mRNA, DNA, cDNA) encoding such concatemeric peptides). In aspects, the concatemeric peptides of the instant disclosure include one or more of SEQ ID NOS: 1685-1692 (as well as nucleic acids (e.g., RNA mRNA, DNA, cDNA) encoding such concatemeric peptides). In aspects, the concatemeric peptides of the instant disclosure include one or more of SEQ ID NOS: 2593-2604 (as well as nucleic acids (e.g., RNA mRNA, DNA, cDNA) encoding such concatemeric peptides). In aspects, the concatemeric peptides of the instant disclosure include one or more of SEQ ID NOS: 2719-2722 (as well as nucleic acids (e.g., RNA mRNA, DNA, cDNA) encoding such concatemeric peptides). In aspects, the present disclosure provides a concatemeric polypeptide with at least 60%, 70%, 80%, 90%, or 95% homology to each of SEQ ID NOS: 1677-1692, 2593-2604, 2639-2646, and 2719-2734. In aspects, the present disclosure provides a concatemeric polypeptide having anti-SARS-CoV-2 activity, said polyeptide having at least 60%, 70%, 80%, 90%, or 95% homology to each of SEQ ID NOS: 1677-1692, 2593-2604, 2639-2646, and 2719-2734. In aspects, the present disclosure provides concatemeric polypeptides with at least 60%, 70%, 80%, 90%, or 95% homology to those of SEQ ID NOS: 1677-1692, 2593-2604, 2639-2646, and 2719-2734. As previously described, anti-SARS-CoV-2 activity means that the instantly-disclosed therapeutic T-cell epitope compounds and compositions are, in aspects: capable of stimulating, inducing, and/or expanding an immune response to SARS-CoV-2 (e.g., a cellular (CD4+ and/or CD8+ T-cell response) or humoral immune response to SARS-CoV-2) and/or associated diseases in a subject; capable of stimulating, inducing, and/or expanding a SARS-CoV-2-specific IFNγresponse (e.g., by lymphocytes such as PMBC, or effector CD4+ and/or CD8+ T-cells), capable of inhibiting SARS-CoV-2 viral replication or infectivity, and/or capable of inducing immunity against SARS-CoV-2. In aspects, a T-cell epitope compound or composition of the present disclosure having anti-SARS-CoV-2 activity will reduce the disease symptoms resulting from SARS-CoV-2 challenge by at least about 5% to about 50%, at least about 10% to about 60%, at least about 30% to about 70%, at least about 40% to about 80%, or at least about 50% to about 90% or greater, including any value or range therebetween. Again, anti-SARS-CoV-2 activity can be determined by various experiments and assays as known to those of skill in the art, including methods such as by antibody titrations of sera, e.g., by ELISA and/or seroneutralization assay analysis and/or by vaccination challenge evaluation, including use of experiments and assays as disclosed in the Examples herein.

[0147] In aspects, the concatemeric polypeptides of the instant disclosure can be isolated, recombinant, and/or synthetic. In aspects, the concatemeric peptides or polypeptides can be either in neutral (uncharged) or salt forms, and may be either free of or include modifications such as glycosylation, side chain oxidation, or phosphorylation. In aspects, the concatemeric peptides or polypeptides of the instant disclosure can be capped with an n-terminal acetyl and/or c-terminal amino group.

[0148] In aspects, one or more peptides or polypeptides of the instant disclosure (e.g., but not limited to, a peptide or polypeptide comprising, consisting, or consisting essentially of an amino acid sequence of SEQ ID NOS: 4-1676, 1713-2595, 2605-2638, 2647-2718, and 2735-8692 (and/or fragments or variants thereof), and optionally 1 to 12 additional amino acids distributed in any ratio on the N terminus and/or C-terminus of the polypeptide of SEQ ID NOS: 4-1676, 1713-2595, 2605-2638, 2647-2718, and 2735-8692; as well as the concatemeric polypeptides disclosed herein, including SEQ ID NOS: 1677-1692, 2593-2604, 2639-2646, and 2719-2734) joined to, linked to (e.g., fused in-frame, chemically-linked, or otherwise bound), and/or inserted into a heterologous polypeptide. As previously described, with respect to the one or more T-cell epitopes of the instant disclosure, the term “heterologous polypeptide” is intended to mean that the one or more T-cell epitopes of the instant disclosure are heterologous to, or not included naturally, in the heterologous polypeptide. In aspects, a heterologous polypeptide may include, but are not limited to, e.g. monoclonal antibody, polyclonal antibody, mouse antibody, human antibody, humanized antibody, mono specific antibody, bispecific antibody, glycosylated antibody, Fc-modified antibody, or antibody-drug conjugates; an antibody of different class or subclass (e.g., IgG (e.g., IgG1, IgG2, IgG3, IgG4), IgM, IgA, IgD or IgE molecules) or antigen-specific antibody fragments thereof (including, but not limited to, a Fab, F(ab′)₂, Fv, disulfide linked Fv, scFv, single domain antibody, closed conformation multispecific antibody, disulfide-linked scFv, diabody)). In aspects, one or more of the instantly-disclosed polypeptides may be inserted into the heterologous polypeptide (e.g., through recombinant techniques, mutagenesis, or other known means in the art), may be added to the C-terminus (with or without the use of linkers, as is known in the art), and/or added to the N-terminus (with or without the use of linkers, as is known in the art) of the heterologous polypeptide. In aspects, one or more of the instantly-disclosed polypeptides may be inserted into or replace amino acids in a Fc domain as disclosed in U.S. Pat. Nos. 7,442,778, 7,645,861, 7,655,764, 7,655,765, and/or 7,750,128 (each of which are herein incorporated by reference in their entirety). For example, protein engineering by mutagenesis can be performed using site-directed mutagenesis techniques, or other mutagenesis techniques known in the art (see e.g., James A. Brannigan and Anthony J. Wilkinson., 2002, Protein engineering 20 years on. Nature Reviews Molecular Cell Biology 3, 964-970; Turanli-Yildiz B. et al., 2012, Protein Engineering Methods and Applications, intechopen.com, which are herein incorporated by reference in their entirety). In aspects, chimeric or fusion polypeptides comprise one or more of the instantly-disclosed polypeptides of the present disclosure operatively linked to a heterologous polypeptide. “Operatively linked” indicates that the one or more of the instantly-disclosed polypeptides and the heterologous protein are fused in-frame or chemically linked or otherwise bound. For example, in aspects, the one or more of the instantly-disclosed polypeptides may be covalently bound to one or more internal conjugation site(s) in an Fc domain as disclosed in U.S. Pat. Nos. 8,008,453, 9,114,175, and/or 10,188,740 (each of which are herein incorporated by reference in their entirety). In aspects, the one or more peptides or polypeptides of the instant disclosure (e.g., but not limited to, a peptide or polypeptide comprising, consisting, or consisting essentially of an amino acid sequence of SEQ ID NOS: 4-1676, 1713-2595, 2605-2638, 2647-2718, and 2735-8692 (and/or fragments or variants thereof), and optionally 1 to 12 additional amino acids distributed in any ratio on the N terminus and/or C-terminus of the polypeptide of SEQ ID NOS: 4-1676, 1713-2595, 2605-2638, 2647-2718, and 2735-8692) may be joined to, linked to (e.g., fused in-frame, chemically-linked, or otherwise bound), and/or inserted into a heterologous polypeptide as a whole, although it may be made up from a joined to, linked to (e.g., fused in-frame, chemically-linked, or otherwise bound), and/or inserted amino acid sequence, together with flanking amino acids of the heterologous polypeptide. In aspects, the present disclosure is directed to polypeptide (which, in aspects, may be an isolated, synthetic, or recombinant) having a sequence comprising one or more of SEQ ID NOS: 4-1676, 1713-2595, 2605-2638, 2647-2718, and 2735-8692 (and/or fragments or variants thereof, and optionally 1 to 12 additional amino acids distributed in any ratio on the N terminus and/or C-terminus of the polypeptide of SEQ ID NOS: 4-1676, 1713-2595, 2605-2638, 2647-2718, and 2735-8692), wherein said one or more of SEQ ID NOS: 4-1676, 1713-2595, 2605-2638, 2647-2718, and 2735-8692 is not naturally included in the polypeptide and/or said one or more of SEQ ID NOS: 4-1676, 1713-2595, 2605-2638, 2647-2718, and 2735-8692 is not located at its natural position in the polypeptide. For example, in aspects, the one or more peptides, polypeptides, and/or concatemeric peptides of the present disclosure may be inserted into a SARS-CoV-2 sequence in which the SARS-CoV-2 sequence does not include the one or more peptides, polypeptides, and/or concatemeric peptides of the present disclosure (e.g., the SARS-CoV-2 sequence does not include, or is mutated to not include, the one or more peptides, polypeptides, and/or concatemeric peptides of the present disclosure) or the one or more peptides, polypeptides, and/or concatemeric peptides of the present disclosure is inserted into a SARS-CoV-2 sequence but not at its natural position. In aspects, the one or more peptides or polypeptides of the instant disclosure can be joined or linked to (e.g., fused in-frame, chemically-linked, or otherwise bound) to a small molecule (e.g., albumin or other known carriers and proteins), drug, or drag fragment, for example but not limited to, a drug or drug fragment that is binds with high affinity to defined HLAs.

[0149] As used herein, two polypeptides (or a region of the polypeptides) are substantially homologous or identical when the amino acid sequences are at least about 45-55%, typically at least about 70-75%, more typically at least about 80-85%, more typically greater than about 90%, and more typically greater than 95% or more homologous or identical. To determine the percent homology or identity of two amino acid sequences, or of two nucleic acid sequences, the sequences are aligned for optimal comparison purposes (e.g., gaps can be introduced in the sequence of one polypeptide or nucleic acid molecule for optimal alignment with the other polypeptide or nucleic acid molecule). The amino acid residues or nucleotides at corresponding amino acid positions or nucleotide positions are then compared. When a position in one sequence is occupied by the same amino acid residue or nucleotide as the corresponding position in the other sequence, then the molecules are homologous at that position. As is known in the art, the percent identity between the two sequences is a function of the number of identical positions shared by the sequences, taking into account the number of gaps, and the length of each gap, which need to be introduced for optimal alignment of the two sequences. Sequence homology for polypeptides is typically measured using sequence analysis software. As used herein, amino acid or nucleic acid “homology” is equivalent to amino acid or nucleic acid “identity”. In aspects, the percent homology between the two sequences is a function of the number of identical positions shared by the sequences (e.g., percent homology equals the number of identical positions/total number of positions x 100).

[0150] In aspects, the present disclosure also encompasses polypeptides having a lower degree of identity but having sufficient similarity so as to perform one or more of the same functions performed by a polypeptide of the instant disclosure (e.g., a polypeptide having a sequence comprising, consisting of, or consisting essentially of one or more of SEQ ID NOS: 4-1676, 1713-2595, 2605-2638, 2647-2718, and 2735-8692 and/or fragments and variants thereof, and optionally 1 to 12 additional amino acids distributed in any ratio on the N terminus and/or C-terminus of the polypeptide of SEQ ID NOS: 4-1676, 1713-2595, 2605-2638, 2647-2718, and 2735-8692; concatemeric peptides as disclosed herein, including the concatemeric peptides of SEQ ID NOS: 1677-1692, 2593-2604, 2639-2646, and 2719-2734),. Similarity is determined by conserved amino acid substitution. Such substitutions are those that substitute a given amino acid in a polypeptide by another amino acid of like characteristics. Conservative substitutions are likely to be phenotypically silent. Typically seen as conservative substitutions are the replacements, one for another, among the aliphatic amino acids Ala, Val, Leu, Met, and Ile; interchange of the hydroxyl residues Ser and Thr, exchange of the acidic residues Asp and Glu, substitution between the amide residues Asn and Gln, exchange of the basic residues His, Lys and Arg and replacements among the aromatic residues Trp, Phe and Tyr. Guidance concerning which amino acid changes are likely to be phenotypically silent are found (Bowie J U et al., (1990), Science, 247(4948):130610, which is herein incorporated by reference in its entirety). In aspects, a variant polypeptide can differ in amino acid sequence by one or more substitutions, deletions, insertions, inversions, fusions, and truncations or a combination of any of these. Variant polypeptides can be fully functional (e.g., retain MHC binding propensity and/or TCR specificity, and/or retain anti-SARS-CoV-2 activity) or can lack function in one or more activities. Fully functional variants typically contain only conservative variation or variation in non-critical residues or in non-critical regions; in this case, typically MHC contact residues provided MHC binding is preserved. Functional variants can also contain substitution of similar amino acids that result in no change or an insignificant change in function (e.g., retain MHC binding propensity and/or TCR specificity, and/or retain anti-SARS-CoV-2 activity). Alternatively, such substitutions can positively or negatively affect function to some degree. Non-functional variants typically contain one or more non-conservative amino acid substitutions, deletions, insertions, inversions, or truncation or a substitution, insertion, inversion, or deletion in a critical residue or critical region; in this case, typically TCR contact residues. In aspects, a variant and/or a homologous polypeptide retains the desired anti-SARS-CoV-2 activity of the instant disclsoure (e.g.: capable of stimulating, inducing, and/or expanding an immune response to SARS-CoV-2 (e.g., a cellular (CD4+ and/or CD8+ T-cell response) or humoral immune response to SARS-CoV-2) and/or associated diseases in a subject; capable of stimulating, inducing, and/or expanding a SARS-CoV-2-specific IFNγresponse (e.g., by lymphocytes such as PMBC, or effector CD4+ and/or CD8+ T-cells); and/or capable of inhibiting SARS-CoV-2 viral replication or infectivity, and/or capable of inducing immunity against SARS-CoV-2). Alternatively, such substitutions can positively or negatively affect function to some degree. Non-functional variants typically contain one or more non-conservative amino acid substitutions, deletions, insertions, inversions, or truncation or a substitution, insertion, inversion, or deletion in a critical residue or critical region; in this case, typically TCR contact residues. In aspects, funcational variants of a polypeptide having a sequence (or a core sequence) comprising, consisting of, or consisting essentially of one or more of SEQ ID NOS: 4-1676, 1713-2595, 2605-2638, 2647-2718, and 2735-8692 as disclosed herein may contain one or more conservative substitutions, and in aspects one or more non-conservative substitutions, at amino acid residues which are not believed to be essential for functioning (with amino acid residues considered being essential for functioning, including, e.g., retain WIC binding propensity and/or TCR specificity, and/or retain anti-SARS-CoV-2 activity) of the instantly-disclosed polypeptides. For example, in aspects, a variant polypeptide having a sequence (or a core sequence) comprising, consisting of, or consisting essentially of one or more of SEQ ID NOS: 4-1676, 1713-2595, 2605-2638, 2647-2718, and 2735-8692, or fragments thereof as disclosed herein, or a concatemeric peptide of SEQ ID NOS: 1677-1692, 2593-2604, 2639-2646, and 2719-2734 or a fragment thereof as disclosed herein, may contain one or more conservative substitutions (and in aspects, a nonconservative subsitution) in one or more HLA contact residues, provided HLA binding is preserved. MHC binding assays are well known in the art. In aspects, such assays may include the testing of binding affinity with respect to WIC class I and class II alleles in in vitro binding assays, with such binding assays as are known in the art. Exampels include, e.g., the soluble binding assays as disclosed in U.S. Pat. No. 7,884,184 or PCT/US2020/020089, both of which are herein incorporated by reference in their entireties. Additionally, in aspects, a fully functional variant polypeptide having a sequence (or a core sequence) comprising, consisting of, or consisting essentially of one or more of SEQ ID NOS: 4-1676, 1713-2595, 2605-2638, 2647-2718, and 2735-8692 as disclosed herein do not contain mutations at one or more critical residues or regions, such as TCR contact residues.

[0151] In aspects, the TCR-binding epitope (which can be referred to as TCR binding residues, TCR facing epitope, TCR facing residues, or TCR contacts) for a 9-mer identified epitope (which may be a 9-mer fragment of one or more of SEQ ID NOS: 4-1676, 1713-2595, 2605-2638, 2647-2718, and 2735-8692 as disclosed herein or a 9-mer fragment of a concatemeric peptide of SEQ ID NOS: 1677-1692, 2593-2604, 2639-2646, and 2719-2734) that bind to a MHC class II molecule are at position 2, 3, 5, 7, and 8 of the identified epitope, while the MHC-binding agretope (which can be referred to as MHC contacts, MHC facing residues, WIC-binding residues, or MHC-binding face) for a 9-mer identified epitope (which may be a 9-mer fragment of one or more of SEQ ID NOS: 4-1676, 1713-2595, 2605-2638, 2647-2718, and 2735-8692 as disclosed herein or a 9-mer fragment of a concatemeric peptide of SEQ ID NOS: 1677-1692, 2593-2604, 2639-2646, and 2719-2734) that bind to a WIC class II molecule are at position 1, 4, 6, and 9, both as counted from the amino terminal.

[0152] In aspects, the TCR binding epitope for a 9-mer identified epitope (which may be a 9-mer fragment of one or more of SEQ ID NOS: 4-1676, 1713-2595, 2605-2638, 2647-2718, and 2735-8692 or as disclosed herein or a 9-mer fragment of a concatemeric peptide of SEQ ID NOS: 1677-1692, 2593-2604, 2639-2646, and 2719-2734) that binds to a MHC class I molecule are at position 4, 5, 6, 7, and 8 of the identified epitope, while the MHC binding agretope for a 9-mer identified epitope (which may be a 9-mer fragment of one or more of SEQ ID NOS: 4-1676, 1713-2595, 2605-2638, 2647-2718, and 2735-8692 as disclosed herein or a 9-mer fragment of a concatemeric peptide of SEQ ID NOS: 1677-1692, 2593-2604, 2639-2646, and 2719-2734) that bind to a WIC class I molecule are at position 1, 2, 3, and 9, both as counted from the amino terminal.

[0153] In aspects, the TCR binding epitope for a 10-mer identified epitope that bind to a MHC class I molecule are at position 4, 5, 6, 7, 8, and 9 of the identified epitope (which may be a 10-mer fragment of one or more of SEQ ID NOS: 4-1676, 1713-2595, 2605-2638, 2647-2718, and 2735-8692 as disclosed herein or a 10-mer fragment of a concatemeric peptide of SEQ ID NOS: 1677-1692, 2593-2604, 2639-2646, and 2719-2734), while the MHC binding agretope for a 10-mer identified epitope (which may be a 10-mer fragment of one or more of SEQ ID NOS: 4-1676, 1713-2595, 2605-2638, 2647-2718, and 2735-8692 as disclosed herein or a 10-mer fragment of a concatemeric peptide of SEQ ID NOS: 1677-1692, 2593-2604, 2639-2646, and 2719-2734) that bind to a MHC class I molecule are at position 1, 2, 3, 9, and 10, both as counted from the amino terminal.

[0154] In aspects, the TCR-binding epitope for a 9-mer identified epitope (which may be a 9-mer fragment of one or more of SEQ ID NOS: 4-1676, 1713-2595, 2605-2638, 2647-2718, and 2735-8692 as disclosed herein or a 9-mer fragment of a concatemeric peptide of SEQ ID NOS: 1677-1692, 2593-2604, 2639-2646, and 2719-2734) that bind to a MHC class II molecule are at any combination of residues at positions 2, 3, 5, 7, and 8 (e.g., but not limited to, positions 3, 5, 7 and 8; positions 2, 5, 7, and 8; positions 2, 3, 5, and 7, etc.) of the identified epitope, while the MHC binding agretope for a 9-mer identified epitope (which may be a 9-mer fragment of one or more of SEQ ID NOS: 4-1676, 1713-2595, 2605-2638, 2647-2718, and 2735-8692 as disclosed herein or a 9-mer fragment of a concatemeric peptide of SEQ ID NOS: 1677-1692, 2593-2604, 2639-2646, and 2719-2734) is the complementary face to the TCR facing residues, both as counted from the amino terminal.

[0155] In aspects, the TCR binding epitope for 9-mer identified epitope (which may be a 9-mer fragment of one or more of SEQ ID NOS: 4-1676, 1713-2595, 2605-2638, 2647-2718, and 2735-8692 as disclosed herein or a 9-mer fragment of a concatemeric peptide of SEQ ID NOS: 1677-1692, 2593-2604, 2639-2646, and 2719-2734) that bind to a MHC class I molecule are at positions 4, 5, 6, 7, and 8; 1, 4, 5, 6, 7 and 8; or 1, 3, 4, 5, 6, 7, and 8 of the identified epitope, while the MHC binding agretope for a 9-mer identified epitope (which may be a 9-mer fragment of one or more of SEQ ID NOS: 4-1676, 1713-2595, 2605-2638, 2647-2718, and 2735-8692 as disclosed herein or a 9-mer fragment of a concatemeric peptide of SEQ ID NOS: 1677-1692, 2593-2604, 2639-2646, and 2719-2734) is the complementary face to the TCR facing residues, both as counted from the amino terminal.

[0156] In aspects, the TCR-binding epitope for a 10-mer identified epitope (which may be a 10-mer fragment of one or more of SEQ ID NOS: 4-1676, 1713-2595, 2605-2638, 2647-2718, and 2735-8692 as disclosed herein or a 10-mer fragment of a concatemeric peptide of SEQ ID NOS:

[0157] 1677-1692, 2593-2604, 2639-2646, and 2719-2734) that bind to a MHC class I molecule are at any combination of residues at positions 1, 3, 4, 5, 6, 7, 8, and 9 of the identified epitope, while the MHC binding agretope for a 10-mer identified epitope (which may be a 10-mer fragment of one or more of SEQ ID NOS: 4-1676, 1713-2595, 2605-2638, 2647-2718, and 2735-8692 as disclosed herein or a 10-mer fragment of a concatemeric peptide of SEQ ID NOS: 1677-1692, 2593-2604, 2639-2646, and 2719-2734) is the complementary face to the TCR facing residues, both as counted from the amino terminal.

[0158] Based on the above, it should be understood that in apsects in which one or more 9-mers and/or 10-mer epitopes are contained within a longer polypeptide and are predicted to bind one or more Class I or Class II MHC molecules and are occurring in close proximity to each other in a naturally occurring sequence (e.g., wherein position 1 of each pair of binding 9-mers and/or 10-mers fall within, e.g., 3 amino acids of each other), such epitopes may be combined to form an epitope cluster. In a given cluster, any given amino acid may be, with respect to a given 9-mer epitope or 10-mer epitope, MHC facing and, with respect to another 9-mer epitope, TCR facing.

[0159] In aspects, the present disclosure also includes fragments of the instantly-disclosed polypeptides and concatemeric polypeptides. In aspects, the present disclosure also encompasses fragments of the variants of the instantly-disclosed polypeptides and concatemeric polypeptides as described herein. In aspects, as used herein, a fragment comprises at least about nine contiguous amino acids. In aspects, the present disclosure also encompasses fragments of the variants of the T-cell epitopes described herein. Useful fragments (and fragments of the variants of the polypeptides and concatemeric polypeptides described herein) include those that retain one or more of the biological activities, particularly: MHC binding propensity and/or TCR specificity, and/or anti-SARS-CoV-2 activity. Biologically active fragments are, for example, about 9, 10, 11, 12, 1, 14, 15, 16, 20, 25, 30, 40, 50, 60, 70, 80, 90, 100 or more amino acids in length, including any value or range therebetween. Fragments can be discrete (not fused to other amino acids or polypeptides) or can be within a larger polypeptide. Several fragments can be comprised within a single larger polypeptide. In aspects, a fragment designed for expression in a host can have heterologous pre- and pro-polypeptide regions fused to the amino terminus of the polypeptide fragment and an additional region fused to the carboxyl terminus of the fragment.

[0160] In aspects, the instantly disclosed polypeptides and concatemeric polypeptides of the present disclosure can include allelic or sequence variants (“mutants”) or analogs thereof, or can include chemical modifications (e.g., pegylation, glycosylation). In aspects, a mutant retains the same function, particularly MHC binding propensity and/or TCR specificity, and/or anti-SARS-CoV-2 activity. In aspects, a mutant can provide for enhanced binding to MHC molecules. In aspects, a mutant can lead to enhanced binding to TCRs. In another instance, a mutant can lead to a decrease in binding to MHC molecules and/or TCRs. Also contemplated is a mutant that binds, but does not allow signaling via the TCR.

[0161] The manner of producing the polypeptides of the present disclosure will vary widely, depending upon the nature of the various elements comprising the molecule. For example, an isolated polypeptide can be purified from cells that naturally express it, purified from cells that have been altered to express it (recombinant), or synthesized using known protein synthesis methods. The synthetic procedures may be selected so as to be simple, provide for high yields, and allow for a highly purified stable product. For example, polypeptides of the instant disclosure can be produced either from a nucleic acid disclosed herein, or by the use of standard molecular biology techniques, such as recombinant techniques, mutagenesis, or other known means in the art. An isolated polypeptide can be purified from cells that naturally express it, purified from cells that have been altered to express it (recombinant), or synthesized using known protein synthesis techniques. In aspects, a polypeptide of the instant disclosure is produced by recombinant DNA or RNA techniques. In aspects, a polypeptide of the instant disclosure can be produced by expression of a recombinant nucleic acid of the instant disclosure in an appropriate host cell. For example, a nucleic acid molecule encoding the polypeptide is cloned into an expression cassette or expression vector, the expression cassette or expression vector introduced into a host cell and the polypeptide expressed in the host cell. The polypeptide can then be isolated from the cells by an appropriate purification scheme using standard protein purification techniques. Alternatively a polypeptide can be produced by a combination of ex vivo procedures, such as protease digestion and purification. Further, polypeptides of the instant disclosure can be produced using site-directed mutagenesis techniques, or other mutagenesis techniques known in the art (see e.g., James A. Brannigan and Anthony J. Wilkinson., 2002, Protein engineering 20 years on. Nature Reviews Molecular Cell Biology 3, 964-970; Turanli-Yildiz B. et al., 2012, Protein Engineering Methods and Applications, intechopen.com, which are herein incorporated by reference in their entirety).

[0162] In aspects, the present disclosure also provides chimeric or fusion polypeptide compositions. In aspects, the present disclosure is directed to a chimeric or fusion polypeptide composition (which in aspects may be isolated, synthetic, or recombinant) comprising one or more peptides, polypeptides, or concatemeric peptides of the present disclosure (e.g., one or more peptides or polypeptides of the present disclosure have a sequence, e.g. but not limited to, comprising, consisting, or consisting essentially of an amino acid sequence of SEQ ID NOS: 4-1676, 1713-2595, 2605-2638, 2647-2718, and 2735-8692 (and/or fragments or variants thereof), and optionally 1 to 12 additional amino acids distributed in any ratio on the N terminus and/or C-terminus of the polypeptide of SEQ ID NOS: 4-1676, 1713-2595, 2605-2638, 2647-2718, and 2735-8692, and similarly may have a sequence, e.g. but not limited to, comprising, consisting, or consisting essentially of an amino acid sequence of SEQ ID NOS: 1677-1692, 2593-2604, 2639-2646, and 2719-2734 (and/or fragments or variants thereof), and optionally 1 to 12 additional amino acids distributed in any ratio on the N terminus and/or C-terminus of the polypeptide of SEQ ID NOS: 1677-1692, 2593-2604, 2639-2646, and 2719-2734). In aspects, a chimeric or fusion polypeptide composition of the present disclosure comprises one or more peptides, polypeptides, and/or concatemeric peptides of the present disclosure joined to, linked to (e.g., fused in-frame, chemically-linked, or otherwise bound), and/or inserted into a heterologous polypeptide, such as an unrelated protein. As previously described, with respect to the one or more T-cell epitopes (e.g., peptide, polypeptides, or concatemeric peptides of the instant disclosure), the term “heterologous polypeptide” is intended to mean that the one or more T-cell epitopes of the instant disclosure are heterologous to, or not included naturally, in the heterologous polypeptide. In aspects, a heterologous polypeptide may include, but are not limited to, e.g. monoclonal antibody, polyclonal antibody, mouse antibody, human antibody, humanized antibody, mono specific antibody, bispecific antibody, glycosylated antibody, Fc-modified antibody, or antibody-drug conjugates; an antibody of different class or subclass (e.g., IgG (e.g., IgG1, IgG2, IgG3, IgG4), IgM, IgA, IgD or IgE molecules) or antigen-specific antibody fragments thereof (including, but not limited to, a Fab, F(ab′)2, Fv, disulfide linked Fv, scFv, single domain antibody, closed conformation multispecific antibody, disulfide-linked scFv, diabody)). In aspects, one or more of the instantly-disclosed peptides, polypeptides, or concatemeric peptides may be inserted into the heterologous polypeptide (e.g., through recombinant techniques, mutagenesis, or other known means in the art), may be added to the C-terminus (with or without the use of linkers, as is known in the art), and/or added to the N-terminus (with or without the use of linkers, as is known in the art) of the heterologous polypeptide. In aspects, one or more of the instantly-disclosed polypeptides may be inserted into or replace amino acids in a Fc domain as disclosed in U.S. Pat. Nos. 7,442,778, 7,645,861, 7,655,764, 7,655,765, and/or 7,750,128 (each of which are herein incorporated by reference in their entirety). For example, protein engineering by mutagenesis can be performed using site-directed mutagenesis techniques, or other mutagenesis techniques known in the art (see e.g., James A. Brannigan and Anthony J. Wilkinson., 2002, Protein engineering 20 years on. Nature Reviews Molecular Cell Biology 3, 964-970; Turanli-Yildiz B. et al., 2012, Protein Engineering Methods and Applications, intechopen.com, which are herein incorporated by reference in their entirety). In aspects, chimeric or fusion polypeptides comprise one or more of the instantly-disclosed peptides, polypeptides, or concatemeric peptides operatively linked to a heterologous polypeptide. “Operatively linked” indicates that the one or more of the instantly-disclosed peptides, polypeptides, or concatemeric peptides and the heterologous polypeptide are fused in-frame or chemically-linked or otherwise bound. For example, in aspects, the one or more of the instantly-disclosed polypeptides may be covalently bound to one or more internal conjugation site(s) in an Fc domain as disclosed in U.S. Pat. Nos. 8,008,453, 9,114,175, and/or 10,188,740 (each of which are herein incorporated by reference in their entirety). In aspects, the one or more peptides, polypeptides, or concatemeric peptides of the instant disclosure may be joined to, linked to (e.g., fused in-frame, chemically-linked, or otherwise bound), and/or inserted into a heterologous polypeptide as a whole, although it may be made up from a joined to, linked to (e.g., fused in-frame, chemically-linked, or otherwise bound), and/or inserted amino acid sequence, together with flanking amino acids of the heterologous polypeptide. In aspects, a chimeric or fusion polypeptide composition comprises a peptide, polypeptide, or concatemeric peptide of the instant disclosure wherein said one or more of peptides, polypeptides, or concatemeric peptides is not naturally included in the heterologous polypeptide and/or said one or more of peptides, polypeptides, or concatemeric peptides is not located at its natural position in the heterologous polypeptide. In aspects, the one or more of peptide or polypeptides of the present disclosure can be joined, linked to (e.g., fused in-frame, chemically-linked, or otherwise bound), and/or inserted into the heterologous polypeptide. In aspects, chimeric or fusion polypeptide compositions comprise one or more of the instantly-disclosed T-cell epitopes (e.g., peptides, polypeptides, or concatemeric peptides of the instant disclosure) operatively linked to a heterologous polypeptide having an amino acid sequence not substantially homologous to the T-cell epitope. In aspects, the chimeric or fusion polypeptide does not affect function of the T-cell epitope per se. For example, the fusion polypeptide can be a GST-fusion polypeptide in which the T-cell epitope sequences are fused to the C-terminus of the GST sequences. Other types of fusion polypeptides include, but are not limited to, enzymatic fusion polypeptides, for example beta-galactosidase fusions, yeast two-hybrid GAL fusions, poly-His fusions and Ig fusions. Such fusion polypeptides, particularly poly-His fusions or affinity tag fusions, can facilitate the purification of recombinant polypeptide. In certain host cells (e.g., mammalian host cells), expression and/or secretion of a polypeptide can be increased by using a heterologous signal sequence. Therefore, in aspects, the chimeric or fusion polypeptide contains a heterologous signal sequence at its N-terminus. In aspects of the above chimeric or fusion polypeptide compositions, the heterologous polypeptide or polypeptide comprises a biologically active molecule. In aspects, the biologically active molecule is selected from the group consisting of an immunogenic molecule, a T cell epitope, a viral protein, and a bacterial protein. In aspects, the one or more peptides, polypeptides, or concatemeric peptides of the instant disclosure can be joined or linked to (e.g., fused in-frame, chemically-linked, or otherwise bound) to a small molecule, drug, or drug fragment. For example, the one or more peptides, polypeptides, or concatemeric peptides of the instant disclosure can be joined or linked to (e.g., fused in-frame, chemically-linked, or otherwise bound) to an unrelated peptide or protein, a small molecule (e.g., albumin or other known carriers and proteins), drug, or drag fragment, for example but not limited to, a drug or drug fragment that is binds with high affinity to defined HLAs. In aspects of the above-described chimeric or fusion polypeptide compositions, the chimeric or fusion polypeptide compositions can be recombinant, isolated, and/or synthetic.

[0163] A chimeric or fusion polypeptide composition can be produced by standard recombinant DNA or RNA techniques as are known in the art. For example, DNA or RNA fragments coding for the different polypeptide sequences may be ligated together in-frame in accordance with conventional techniques. In another embodiment, the fusion gene can be synthesized by conventional techniques including automated DNA synthesizers. Alternatively, polymerase chain reaction (PCR) amplification of nucleic acid fragments can be carried out using anchor primers which give rise to complementary overhangs between two consecutive nucleic acid fragments which can subsequently be annealed and re-amplified to generate a chimeric nucleic acid sequence(Short Protocols in Molecular Biology: A Compendium of Methods from Current Protocols in Molecular Biology, (2^{ND}, 1992), FM Asubel et al. (eds), Green Publication Associates, New York, N.Y. (Publ), ISBN: 9780471566355, which is herein incorporated by reference in its entirety). Further, one or more peptides, polypeptides or concatemeric of the instant disclosure (e.g., but not limited to, a peptide or polypeptide comprising, consisting, or consisting essentially of an amino acid sequence of SEQ ID NOS: 4-1676, 1713-2595, 2605-2638, 2647-2718, and 2735-8692 (and/or fragments or variants thereof), and optionally 1 to 12 additional amino acids distributed in any ratio on the N terminus and/or C-terminus of the polypeptide of SEQ ID NOS: 4-1676, 1713-2595, 2605-2638, 2647-2718, and 2735-8692) can be inserted into a heterologous polypeptide or inserted into a non-naturally occurring position of a polypeptide through recombinant techniques, synthetic polymerization techniques, mutagenesis, or other standard techniques known in the art. For example, protein engineering by mutagenesis can be performed using site-directed mutagenesis techniques, or other mutagenesis techniques known in the art (see e.g., James A. Brannigan and Anthony J. Wilkinson., 2002, Protein engineering 20 years on. Nature Reviews Molecular Cell Biology 3, 964-970; Turanli-Yildiz B. et al., 2012, Protein Engineering Methods and Applications, intechopen.com, which are herein incorporated by reference in their entirety).

[0164] In aspects, the polypeptides, concatemeric polypeptides, and chimeric or fusion polypeptides can be purified to homogeneity or partially purified. It is understood, however, that preparations in which the T-cell epitope compounds and compositions are not purified to homogeneity are useful. The critical feature is that the preparation allows for the desired function of the composition, even in the presence of considerable amounts of other components. Thus, the present disclosure encompasses various degrees of purity. In one embodiment, the language “substantially free of cellular material” includes preparations of the polypeptides, concatemeric polypeptides, and chimeric or fusion polypeptides having less than about 30% (by dry weight) other proteins (e.g., contaminating protein), less than about 20% other proteins, less than about 10% other proteins, less than about 5% other proteins, less than about 4% other proteins, less than about 3% other proteins, less than about 2% other proteins, less than about 1% other proteins, or any value or range therebetween.

[0165] In aspects, when a polypeptide, concatemeric polypeptide, and chimeric or fusion polypeptide of the present disclosure is recombinantly produced, the composition can also be substantially free of culture medium, for example, culture medium represents less than about 20%, less than about 10%, or less than about 5% of the volume of the the polypeptides, concatemeric polypeptides, and chimeric or fusion polypeptides preparation. The language “substantially free of chemical precursors or other chemicals” includes preparations of the the polypeptides, concatemeric polypeptides, and chimeric or fusion polypeptides in which it is separated from chemical precursors or other chemicals that are involved in the T-cell epitope's synthesis. The language “substantially free of chemical precursors or other chemicals” can include, for example, preparations of the the polypeptides, concatemeric polypeptides, and chimeric or fusion polypeptides having less than about 30% (by dry weight) chemical precursors or other chemicals, less than about 20% chemical precursors or other chemicals, less than about 10% chemical precursors or other chemicals, less than about 5% chemical precursors or other chemicals, less than about 4% chemical precursors or other chemicals, less than about 3% chemical precursors or other chemicals, less than about 2% chemical precursors or other chemicals, or less than about 1% chemical precursors or other chemicals.

[0166] In aspects, the present disclosure also includes pharmaceutically acceptable salts of the T-cell epitope compounds and compositions (including one or more of e.g., peptides or polypeptides as disclosed herein; concatemeric peptides as disclosed herein; chimeric or fusion polypeptide compositions as disclosed herein (which in aspects may be isolated, synthetic, and/or recombinant). “Pharmaceutically acceptable salt” means a salt that is pharmaceutically acceptable and that possesses the desired pharmacological activity of the parent peptide or polypeptide (e.g., peptides, polypeptides, concatemeric peptides, and/or chimeric or fusion polypeptides as disclosed herein). As used herein, “pharmaceutically acceptable salt” refers to derivative of the instantly-disclosed polypeptides, concatemeric polypeptides, and/or chimeric or fusion polypeptides, wherein such compounds are modified by making acid or base salts thereof. Examples of pharmaceutically acceptable salts include, but are not limited to, mineral or organic acid salts of basic residues such as amines, alkali or organic salts of acidic residues such as carboxylic acids, and the like. The pharmaceutically acceptable salts include the conventional non-toxic salts or the quaternary ammonium salts of the parent compound formed, for example, from non-toxic inorganic or organic acids. For example, such conventional non-toxic salts include, but are not limited to, those derived from inorganic and organic acids selected from 2-acetoxybenzoic, 2-hydroxyethane sulfonic, acetic, ascorbic, benzene sulfonic, benzoic, bicarbonic, carbonic, citric, edetic, ethane disulfonic, 1,2-ethane sulfonic, fumaric, glucoheptonic, gluconic, glutamic, glycolic, glycollyarsanilic, hexylresorcinic, hydrabamic, hydrobromic, hydrochloric, hydroiodic, hydroxymaleic, hydroxynaphthoic, isethionic, lactic, lactobionic, lauryl sulfonic, maleic, malic, mandelic, methane sulfonic, napsylic, nitric, oxalic, pamoic, pantothenic, phenylacetic, phosphoric, polygalacturonic, propionic, salicyclic, stearic, subacetic, succinic, sulfamic, sulfanilic, sulfuric, tannic, tartaric, toluene sulfonic, and the commonly occurring amine acids, e.g., glycine, alanine, phenylalanine, arginine, etc.

### Nucleic Acids

[0167] In aspects, the present disclosure also provides for nucleic acids (e.g., DNAs (including cDNA, RNAs (such as, but limited to mRNA), vectors, viruses, or hybrids thereof, all of which may be isolated, synthetic, or recombinant) that encode in whole or in part one or more one or more peptides, polypeptides, concatemeric peptides, and/or chimeric or fusion polypeptides of the present disclosure as described herein. In aspects, the nucleic acid further comprises, or is contained within, an expression cassette, a plasmid, and expression vector, or recombinant virus, wherein optionally the nucleic acid, or the expression cassette, plasmid, expression vector, or recombinant virus is contained within a cell, optionally a human cell or a non-human cell, and optionally the cell is transformed with the nucleic acid, or the expression cassette, plasmid, expression vector, or recombinant virus. In aspects, cells are transduced, transfected, or otherwise engineered to contain within one or more of e.g., polypeptides of the present disclosure; isolated, synthetic, or recombinant nucleic acids, expression cassettes, plasmids, expression vectors, or recombinant viruses as disclosed herein; and/or isolated, synthetic, or recombinant chimeric or fusion polypeptide compositions as disclosed herein. In aspects, the cell can be a mammalian cell, bacterial cell, insect cell, or yeast cell. In aspects, the nucleic acid molecules of the present disclosure can be inserted into vectors and used, for example, as expression vectors or gene therapy vectors. Gene therapy vectors can be delivered to a subject by, e.g., intravenous injection, local administration (U.S. Pat. No. 5,328,470) or by stereotactic injection (Chen S H et al., (1994), Proc Natl Acad Sci USA, 91(8):3054-7, which are herein incorporated by reference in their entirety). Similarly, the nucleic acid molecules of the present disclosure can be inserted into plasmids. The pharmaceutical preparation of the gene therapy vector can include the gene therapy vector in an acceptable diluent, or can comprise a slow release matrix in which the gene delivery vehicle is imbedded. Alternatively, where the complete gene delivery vector can be produced intact from recombinant cells, e.g., retroviral vectors, the pharmaceutical preparation can include one or more cells that produce the gene delivery system. Such pharmaceutical compositions can be included in a container, pack, or dispenser together with instructions for administration. In aspects of the above nucleic acids (e.g., DNAs, RNAs, vectors, viruses, or hybrids thereof) that encode in whole or in part at least one or more peptides, polypeptides, concatemeric peptides, and/or chimeric or fusion polypeptides as described herein, the nucleic acids encode one or more peptides or polypeptides of the instant disclosure as described above (e.g., but not limited to, a peptide or polypeptide comprising, consisting, or consisting essentially of an amino acid sequence of SEQ ID NOS: 4-1676, 1713-2595, 2605-2638, 2647-2718, and 2735-8692 (and/or fragments or variants thereof), and optionally 1 to 12 additional amino acids distributed in any ratio on the N terminus and/or C-terminus of the polypeptide of SEQ ID NOS: 4-1676, 1713-2595, 2605-2638, 2647-2718, and 2735-8692; as well as the concatemeric peptides of SEQ ID NOS: 1677-1692, 2593-2604, 2639-2646, and 2719-2734). In aspects, the present disclosure is directed to a vector comprising a nucleic acid of the present disclosure encoding one or more polypeptides of the present disclosure or chimeric or fusion polypeptide composition of the present disclosure. In aspects, the present disclosure is directed to a cell comprising a vector of the present disclosure. In aspects, the cell can be a mammalian cell, bacterial cell, insect cell, or yeast cell.

[0168] The nucleic acid of the instant disclosure may be DNAs (including but not limited to cDNA) or RNAs (including but not limited to mRNA), single- or double-stranded. The nucleic acid is typically DNA or RNA (including mRNA). The nucleic acid may be produced by techniques well known in the art, such as synthesis, or cloning, or amplification of the sequence encoding the immunogenic polypeptide; synthesis, or cloning, or amplification of the sequence encoding the cell membrane addressing sequence; ligation of the sequences and their cloning/amplification in appropriate vectors and cells. The nucleic acids provided herein (whether RNAs, DNAs, vectors, viruses or hybrids thereof) that encode in whole or in part one or more peptides, polypeptides, concatemeric peptides, and/or chimeric or fusion polypeptides as described herein can be isolated from a variety of sources, genetically engineered, amplified, synthetically produced, and/or expressed/generated recombinantly. Recombinant polypeptides generated from these nucleic acids can be individually isolated or cloned and tested for a desired activity. Any recombinant expression system can be used, including e.g. in vitro, bacterial, fungal, mammalian, yeast, insect or plant cell expression systems. In aspects nucleic acids provided herein are synthesized in vitro by well-known chemical synthesis techniques (as described in, e.g., Adams (1983) J. Am. Chem. Soc. 105:661; Belousov (1997) Nucleic Acids Res. 25:3440-3444; Frenkel (1995) Free Radic. Biol. Med. 19:373-380; Blommers (1994) Biochemistry 33:7886-7896; Narang (1979) Meth. Enzymol. 68:90; Brown (1979) Meth. Enzymol. 68:109; Beaucage (1981) Tetra. Lett. 22:1859; U.S. Pat. No. 4,458,066, all of which are herein incorporated by reference in their entirety). Further, techniques for the manipulation of nucleic acids provided herein, such as, e.g., subcloning, labeling probes (e.g., random-primer labeling using Klenow polymerase, nick translation, amplification), sequencing, hybridization and the like are well described in the scientific and patent literature (see, e.g., Sambrook, ed., MOLECULAR CLONING: A LABORATORY MANUAL (2ND ED.), Vols. 1-3, Cold Spring Harbor Laboratory, (1989); CURRENT PROTOCOLS IN MOLECULAR BIOLOGY, Ausubel, ed. John Wiley & Sons, Inc., New York (1997); LABORATORY TECHNIQUES IN BIOCHEMISTRY AND MOLECULAR BIOLOGY: HYBRIDIZATION WITH NUCLEIC ACID PROBES, Part I. Theory and Nucleic Acid Preparation, Tijssen, ed. Elsevier, N.Y. (1993), all of which are herein incorporated by reference in their entirety).

[0169] A further object of the invention relates to a nucleic acid molecule encoding one or more peptides, polypeptides, concatemeric peptides, and/or chimeric or fusion polypeptides as described herein. The nucleic acid may be used to produce the one or more peptides, polypeptides, concatemeric peptides, and/or chimeric or fusion polypeptides as described herein in vitro or in vivo, or to produce cells expressing the polypeptide on their surface, or to produce vaccines wherein the active agent is the nucleic acid or a vector containing the nucleic acid. The nucleic acid may be, e.g., DNA, cDNA, PNA, CNA, RNA, either single- and/or double-stranded, or native or stabilized forms of polynucleotides as are known in the art.

[0170] As previously mentioned, the nucleic acid molecules according to the present disclosure may be provided in the form of a nucleic acid molecule per se such as naked nucleic acid molecules; a plasmid, a vector; virus or host cell, etc., either from prokaryotic or eukaryotic origin. Vectors include expression vectors that contain a nucleic acid molecule of the invention. An expression vector capable of expressing a polypeptide can be prepared. Expression vectors for different cell types are well known in the art and can be selected without undue experimentation. Generally, the (e.g., cDNA, or RNA, including mRNA) is inserted into an expression vector, such as a plasmid, in proper orientation and correct reading frame for expression. If necessary, the DNA (e.g., cDNA, or RNA, including mRNA) may be linked to the appropriate transcriptional and translational regulatory control nucleotide sequences recognized by the desired host (e.g., bacteria), although such controls are generally available in the expression vector. The vector is then introduced into the host bacteria for cloning using standard techniques. The vectors of the present invention may, for example, comprise a transcriptional promoter, and/or a transcriptional terminator, wherein the promoter is operably linked with the nucleic acid molecule, and wherein the nucleic acid molecule is operably linked with the transcription terminator. One or more peptides or polypeptides of the present disclosure may be encoded by a single expression vector. Such nucleic acid molecules may act as vehicles for delivering peptides/polypeptides to the subject in need thereof, in vivo, in the form of, e.g., DNA/RNA vaccines.

[0171] In aspects, the vector may be a viral vector comprising a nucleic acid as defined above. The viral vector may be derived from different types of viruses, such as, Swinepox, Fowlpox, Pseudorabies, Aujezky's virus, salmonella, vaccinia virus, BHV (Bovine Herpes Virus), HVT (Herpes Virus of Turkey), adenovirus, TGEV (Transmissible Gastroenteritidis Coronavirus), Erythrovirus, and SIV (Simian Immunodeficiency Virus). Other expression systems and vectors may be used as well, such as plasmids that replicate and/or integrate in yeast cells.

[0172] The instant disclosure also relates to a method for preparing a peptide, polypeptide, concatemeric peptide, and/or chimeric or fusion polypeptide of the instant disclosure, the method comprising culturing a host cell containing a nucleic acid or vector as defined above under conditions suitable for expression of the nucleic acid and recovering the polypeptide. As indicated above, the proteins and peptides may be purified according to techniques known per se in the art.

### Pharmaceutical Compositions and Formulations

[0173] In aspects, the T-cell epitope compositions of the present disclosure (including one or more of e.g., polypeptides as disclosed herein; concatemeric peptides as disclosed herein; chimeric of fusion polypeptide compositions as disclosed herein; nucleic acids as disclosed herein, including nucleic acids encoding such peptides, polypeptides, concatemeric peptides, or chimeric of fusion polypeptide compositions as disclosed herein; expression cassettes, plasmids, expression vectors, recombinant viruses, or cells as disclosed herein, and vaccines as disclosed herein; hereafter referred to as “T-cell epitope compounds and compositions of the present disclosure”) may be comprised in a pharmaceutical composition or formulation. In aspects, the instantly-disclosed pharmaceutical compositions or formulations generally comprise a T-cell epitope composition of the present disclosure and a pharmaceutically-acceptable carrier and/or excipient. In aspects, a pharmaceutical composition or formulation comprises an adjuvant. In aspects, said pharmaceutical compositions are suitable for administration. Pharmaceutically-acceptable carriers and/or excipients are determined in part by the particular composition being administered, as well as by the particular method used to administer the composition. Accordingly, there is a wide variety of suitable formulations of pharmaceutical compositions for administering the instantly-disclosed T-cell epitope compositions (see, e.g., Remington's Pharmaceutical Sciences, (18^{TH} Ed, 1990), Mack Publishing Co., Easton, Pa. Publ)). In aspects, the pharmaceutical compositions are generally formulated as sterile, substantially isotonic, and in full compliance with all Good Manufacturing Practice (GMP) regulations of the U.S. Food and Drug Administration. Pharmaceutical compositions as disclosed herein are able for use in stimulating, inducing, and/or expanding an immune response to a SARS-CoV-2 infection and/or related diseases caused by SARS-CoV-2, including COVID-19, in a subject, and can be used in methods of treating and/or preventing SARS-CoV-2 infection and/or related diseases caused by SARS-CoV-2, including COVID-19, in a subject, such as a human.

[0174] The terms “pharmaceutically-acceptable,” “physiologically-tolerable,” and grammatical variations thereof, as they refer to compositions, carriers, excipients, and reagents, are used interchangeably and represent that the materials are capable of administration to or upon a subject without the production of undesirable physiological effects to a degree that would prohibit administration of the composition. For example, “pharmaceutically-acceptable excipient” means, for example, an excipient that is useful in preparing a pharmaceutical composition that is generally safe, non-toxic, and desirable, and includes excipients that are acceptable for veterinary use as well as for human pharmaceutical use. Such excipients can be solid, liquid, semisolid, or, in the case of an aerosol composition, gaseous. A person of ordinary skill in the art would be able to determine the appropriate timing, sequence and dosages of administration for particular T-cell epitope compositions of the present disclosure.

[0175] In aspects, preferred examples of such carriers or diluents include, but are not limited to, water, saline, Ringer's solutions, dextrose solution, and 5% human serum albumin. Liposomes and non-aqueous vehicles such as fixed oils can also be used. The use of such media and compounds for pharmaceutically active substances is well known in the art. Except insofar as any conventional media or compound is incompatible with the T-cell epitope compounds and compositions of the present disclosure and as previously described above, use thereof in the compositions is contemplated. Supplementary active compounds can also be incorporated into the compositions.

[0176] In aspects, T-cell epitope compounds and compositions of the present disclosure are formulated to be compatible with its intended route of administration. The T-cell epitope compounds and compositions of the present disclosure can be administered by parenteral, topical, intravenous, oral, subcutaneous, intraarterial, intradermal, transdermal, rectal, intracranial, intrathecal, intraperitoneal, intranasal; vaginally; intramuscular route or as inhalants. In aspects, T-cell epitope compounds and compositions of the present disclosure can be injected directly into a particular tissue where deposits have accumulated, e.g., intracranial injection. In other aspects, intramuscular injection or intravenous infusion may be used for administration of T-cell epitope compounds and compositions of the present disclosure. In some methods, T-cell epitope compounds and compositions of the present disclosure are administered as a sustained release composition or device, such as but not limited to a MedipadTM device. In aspects, T-cell epitope compounds and compositions of the present disclosure are administered intradermally, e.g., by using a commercial needle-free high-pressure device such as Pulse NeedleFree technology (Pulse 50TM Micro Dose Injection System, Pulse NeedleFree Systems; Lenexa, Kans., USA). In aspects, said commercial needle-free high-pressure device (e.g., Pulse NeedleFree technology) confers one or more of the following benefits: non-invasive, reduces tissue trauma, reduces pain, requires a smaller opening in the dermal layer to deposit the composition in the subject (e.g., only requires a micro skin opening), instant dispersion of the composition, better absorption of the composition, greater dermal exposure to the composition, and/or reduced risk of sharps injury.

[0177] In aspects, T-cell epitope compounds and compositions of the present disclosure can optionally be administered in combination with other agents that are at least partly effective in treating various medical conditions as described herein.

[0178] In aspects, solutions or suspensions used for parenteral, intradermal, or subcutaneous application can include, but are not limited to, the following components: a sterile diluent such as water for injection, saline solution, fixed oils, polyethylene glycols, glycerine, propylene glycol or other synthetic solvents; antibacterial compounds such as benzyl alcohol or methyl parabens; antioxidants such as ascorbic acid or sodium bisulfate; chelating compounds such as ethylenediaminetetraacetic acid (EDTA); buffers such as acetates, citrates or phosphates, and compounds for the adjustment of tonicity such as sodium chloride or dextrose. The pH can be adjusted with acids or bases, such as hydrochloric acid or sodium hydroxide. Examples of excipients can include starch, glucose, lactose, sucrose, gelatin, malt, rice, flour, chalk, silica gel, water, ethanol, DMSO, glycol, propylene, dried skim milk, and the like. The composition can also contain pH buffering reagents, and wetting or emulsifying agents.

[0179] In aspects, pharmaceutical compositions or formulations suitable for injectable use include sterile aqueous solutions (where water soluble) or dispersions and sterile powders for the extemporaneous preparation of sterile injectable solutions or dispersion. For intravenous administration, suitable carriers include physiological saline, bacteriostatic water, Cremophor ELTM (BASF, Parsippany, N.J.) or phosphate buffered saline (PBS). In all cases, the composition is sterile and should be fluid to the extent that easy syringeability exists. It is stable under the conditions of manufacture and storage and is preserved against the contaminating action of microorganisms such as bacteria and fungi. In aspects formulations including a T-cell epitope compound or composition of the present disclosure may include aggregates, fragments, breakdown products and post-translational modifications, to the extent these impurities bind HLA and present the same TCR face to cognate T cells they are expected to function in a similar fashion to pure T-cell epitopes. The carrier can be a solvent or dispersion medium containing, e.g., water, ethanol, polyol (e.g., glycerol, propylene glycol, and liquid polyethylene glycol, and the like), and suitable mixtures thereof. The proper fluidity can be maintained, e.g., by the use of a coating such as lecithin, by the maintenance of the required particle size in the case of dispersion and by the use of surfactants. Prevention of the action of microorganisms can be achieved by various antibacterial and antifungal compounds, e.g., parabens, chlorobutanol, phenol, ascorbic acid, thimerosal, and the like. In many cases, it will be preferable to include isotonic compounds, e.g., sugars, polyalcohols such as manitol, sorbitol, sodium chloride in the composition. Prolonged absorption of the injectable compositions can be brought about by including in the composition a compound that delays absorption, e.g., aluminum monostearate and gelatin.

[0180] In aspects, sterile injectable solutions (e.g., sterile solutions suitable for injectable and/or intradermal needle-free high-pressure device) can be prepared by incorporating the T-cell epitope compounds and compositions of the present disclosure 4—in the required amount in an appropriate solvent with one or a combination of ingredients enumerated above, as required, followed by filtered sterilization. Generally, dispersions are prepared by incorporating the binding agent into a sterile vehicle that contains a basic dispersion medium and the required other ingredients from those enumerated above. In the case of sterile powders for the preparation of sterile injectable solutions, methods of preparation are vacuum drying and freeze-drying that yields a powder of the active ingredient plus any additional desired ingredient from a previously sterile-filtered solution thereof. Further, T-cell epitope compounds and compositions of the present disclosure can be administered in the form of a depot injection or implant preparation that can be formulated in such a manner as to permit a sustained or pulsatile release of the active ingredient.

[0181] In aspects, oral compositions generally include an inert diluent or an edible carrier and can be enclosed in gelatin capsules or compressed into tablets. In aspects, for the purpose of oral therapeutic administration, the binding agent can be incorporated with excipients and used in the form of tablets, troches, or capsules. Oral compositions can also be prepared using a fluid carrier for use as a mouthwash, wherein the compound in the fluid carrier is applied orally and swished and expectorated or swallowed. Pharmaceutically compatible binding compounds, and/or adjuvant materials can be included as part of the composition. In aspects, the tablets, pills, capsules, troches and the like can contain any of the following ingredients, or compounds of a similar nature: a binder such as microcrystalline cellulose, gum tragacanth or gelatin; an excipient such as starch or lactose, a disintegrating compound such as alginic acid, Primogel or corn starch; a lubricant such as magnesium stearate or Sterotes; a glidant such as colloidal silicon dioxide; a sweetening compound such as sucrose or saccharin; or a flavoring compound such as peppermint, methyl salicylate or orange flavoring.

[0182] For administration by inhalation, T-cell epitope compounds and compositions of the present disclosure can be delivered in the form of an aerosol spray from pressured container or dispenser that contains a suitable propellant, e.g., a gas such as carbon dioxide, or a nebulizer.

[0183] In aspects, systemic administration of the T-cell epitope compounds and compositions of the present disclosure can also be by transmucosal or transdermal means. For transmucosal or transdermal administration, penetrants appropriate to the barrier to be permeated are used in the formulation. Such penetrants are generally known in the art, and include, e.g., for transmucosal administration, detergents, bile salts, and fusidic acid derivatives. Transmucosal administration can be accomplished through the use of nasal sprays or suppositories. For transdermal administration, the T-cell epitope compounds and compositions may be formulated into ointments, salves, gels, or creams and applied either topically or through transdermal patch technology as generally known in the art.

[0184] In aspects, the T-cell epitope compounds and compositions of the present disclosure can also be prepared in the form of suppositories (e.g., with conventional suppository bases such as cocoa butter and other glycerides) or retention enemas for rectal delivery.

[0185] In aspects, the T-cell epitope compounds and compositions of the present are prepared with carriers that protect the T-cell epitope compounds and compositions against rapid elimination from the body, such as a controlled-release formulation, including implants and microencapsulated delivery systems. Biodegradable, biocompatible polymers can be used, such as, for example, ethylene vinyl acetate, polyanhydrides, polyglycolic acid, collagen, polyorthoesters, and polylactic acid. Methods for preparation of such formulations will be apparent to those skilled in the art. The materials can also be obtained commercially, e.g., from Alza Corporation and Nova Pharmaceuticals, Inc. Liposomal suspensions (including liposomes targeted to infected cells with monoclonal antibodies to viral antigens) can also be used as pharmaceutically-acceptable carriers. These can be prepared according to methods known to those skilled in the art (U.S. Pat. No. 4,522,811, which is herein incorporated by reference in its entirety). In aspects, the T-cell epitope compounds and compositions of the present disclosure can be implanted within or linked to a biopolymer solid support that allows for the slow release of the T-cell epitope compounds and compositions to the desired site.

[0186] In aspects, it is especially advantageous to formulate oral or parenteral compositions in dosage unit form for ease of administration and uniformity of dosage. Dosage unit form as used herein refers to physically discrete units suited as unitary dosages for the subject to be treated; each unit containing a predetermined quantity of binding agent calculated to produce the desired therapeutic effect in association with the required pharmaceutical carrier. The specification for the dosage unit forms of the instant disclosure are dictated by and directly dependent on the unique characteristics of the binding agent and the particular therapeutic effect to be achieved, and the limitations inherent in the art of compounding such T-cell epitope compounds and compositions for the treatment of a subject.

[0187] In aspects of a pharmaceutical composition as described herein, the composition may comprise at least 2, at least 3, at least 4, at least 5, at least 6, at least 7, at least 8, at least 9, at least 10, at least 11, at least 12, at least 13, at least 14, at least 15, at least 16, at least 17, at least 18, at least 19, or at least 20 of the instantly-disclosed peptides or polypetides (including concatemeric polypeptides) or nucleic acids encoding such peptides or polypeptides (including concatemeric polypeptides). For example, in aspects, a pharmaceutical composition can comprise at least 2, at least 3, at least 4, at least 5, at least 6, at least 7, at least 8, at least 9, at least 10, at least 11, at least 12, at least 13, at least 14, at least 15, at least 16, at least 17, at least 18, at least 19, or at least 20 peptides or polypeptides (including up to 40 peptides or polypetides), including any value or range therebetween, comprising, consisting of, or consisting essentially of one or more peptides or polypeptides having an amino acid sequence comprising, consisting of, or consisting essentially of one or more of SEQ ID NOS: 4-1676, 1713-2595, 2605-2638, 2647-2718, and 2735-8692 and/or fragments and variants thereof, and optionally 1 to 12 additional amino acids distributed in any ratio on the N terminus and/or C-terminus of the polypeptide of SEQ ID NOS: 4-1676, 1713-2595, 2605-2638, 2647-2718, and 2735-8692; concatemeric peptides as disclosed herein, including the concatemeric peptides of SEQ ID NOS: 1677-1692, 2593-2604, 2639-2646, and 2719-2734 and nucleic acids (e.g., RNA mRNA, DNA, cDNA) encoding such peptides, polypeptides, or concatemeric peptides, and/or fragments and variants thereof, as described herein.

### Vaccine Compositions

[0188] The term “vaccine” as used herein includes an agent which may be used to cause, stimulate or amplify the immune system of animals (e.g., humans) against a pathogen. Vaccines of the invention are able to cause or stimulate or amplify an immune response against a SARS-CoV-2 infection (or a closely related virus such as Severe Acute Respiratory Syndrome (SARS) or Middle East respiratory syndrome coronavirus (MERS-CoV)) and/or related diseases caused by SARS-CoV-2, including COVID-19,.

[0189] The term “immunization” includes the process of delivering an immunogen to a subject. Immunization may, for example, enable a continuing high level of antibody and/or cellular response in which T-lymphocytes can kill or suppress the pathogen in the immunized animal, such as a human, which is directed against a pathogen or antigen to which the animal has been previously exposed.

[0190] Vaccines of the instant disclosure comprise an immunologically effective amount of a T cell epitope compound or composition of the instant disclosure as described above, and in aspects in a pharmaceutically acceptable vehicle and optionally with additional excipients and/or an adjuvant. As a result of the vaccination with a composition of the present disclosure, animals, and in aspects humans, become at least partially or completely immune to SARS-CoV-2 infection and/or related diseases caused by SARS-CoV-2, including COVID-19, or resistant to developing moderate or severe SARS-CoV-2 infection and/or related diseases caused by SARS-CoV-2, including COVID-19. The instantly disclosed vaccines may be used to elicit a humoral and/or a cellular response, including CD4+ and CD8+ T effector cell responses. In aspects, an animal subject, such as a human, is protected to an extent to which one to all of the adverse physiological symptoms or effects of SARS-CoV-2 infection and/or related diseases caused by SARS-CoV-2, including COVID-19, are significantly reduced, ameliorated or totally prevented.

[0191] In practice, the exact amount required for an immunologically effective dose may vary from subject to subject depending on factors such as the age and general condition of the subject, the nature of the formulation and the mode of administration. An appropriate “effective amount” may be determined by one of ordinary skill in the art using only routine experimentation. For instance, methods are known in the art for determining or titrating suitable dosages of a vaccine to find minimal effective dosages based on the weight of the animal subject, including human subject, concentration of the vaccine and other typical factors. The dosage of the vaccines of the present disclosure will depend on the species, breed, age, size, vaccination history, and health status of the animal (e.g., swine/pig) to be vaccinated, as well as the route of administration, e.g., subcutaneous, intradermal, oral intramuscular or intravenous administration. The vaccines of the instant disclosure can be administered as single doses or in repeated doses. The vaccines of the instant disclosure can be administered alone, or can be administered simultaneously or sequentially administered with one or more further compositions, such as other porcine immunogenic or vaccine compositions. Where the compositions are administered at different times, the administrations may be separate from one another or overlapping in time.In aspects, the vaccine comprises a unitary dose of between 0.1-3000 including any value or range therebetween of polypeptide and/or nucleic acid of the instant disclosure.

[0192] The dosage of the vaccine, concentration of components therein and timing of administering the vaccine, which elicit a suitable immune response, can be determined by methods such as by antibody titrations of sera, e.g., by ELISA and/or seroneutralization assay analysis and/or by vaccination challenge evaluation.

[0193] In aspects, the vaccine comprises a novel, therapeutic T cell epitope compounds or compositions as disclosed herein) in purified form, optionally in combination with any suitable excipient, carrier, adjuvant, and/or additional protein antigen.

[0194] In another aspect, the vaccine comprises a nucleic acid as defined above, optionally in combination with any suitable excipient, carrier, adjuvant, and/or additional protein antigen. In aspects, the vaccine comprises a viral vector containing a nucleic acid as defined above. In aspects, the vaccine comprises one or more plasmid vectors.

[0195] Vaccine constructs including a T-cell epitope compound or composition of the present disclosure upon administration to a subject may initiate a strong T-cell mediated immune response, but may not induce a humoral immune response. Therefore, aspects of a vaccine against SARS-CoV-2 infection and/or related diseases caused by SARS-CoV-2, including COVID-19, contains a combination of the putative T-cell epitopes together with either live attenuated virus (LAV, for example live attenuated SARS-CoV-2) or inactivated virus (for example inactivated SARS-CoV-2). This vaccine composition (including both the putative T-cell epitopes and an LAV or inactivated virus) upon administration to a subject may induce both cellular and humoral immune responses, thereby conferring comprehensive immunity against SARS-CoV-2 infection and/or related diseases caused by SARS-CoV-2, including COVID-19, in the animals, including humans.

[0196] Vaccines may comprise other ingredients, known per se by one of ordinary skill in the art, such as pharmaceutically acceptable carriers, excipients, diluents, adjuvants, freeze drying stabilizers, wetting or emulsifying agents, pH buffering agents, gelling or viscosity enhancing additives, and preservatives, depending on the route of administration.

[0197] Examples of pharmaceutically acceptable carriers, excipients or diluents include, but are not limited to demineralised or distilled water; saline solution; vegetable based oils such as peanut oil, arachis oil, safflower oil, olive oil, cottonseed oil, maize oil, sesame oil, or coconut oil; silicone oils, including polysiloxanes, such as methyl polysiloxane, phenyl polysiloxane and methylphenyl polysolpoxane; volatile silicones; mineral oils such as light liquid paraffin oil, or heavy liquid paraffin oil; squalene; cellulose derivatives such as methylcellulose, ethylcellulose, carboxymethylcellulose, carboxymethylcellulose sodium salt, or hydroxypropyl methylcellulose; lower alkanols, for example ethanol or isopropanol; lower aralkanols; lower polyalkylene glycols or lower alkylene glycols, for example polyethylene glycol, polypropylene glycol, ethylene glycol, propylene glycol, 1,3-butylene glycol or glycerin; fatty acid esters such as isopropyl palmitate, isopropyl myristate or ethyl oleate; polyvinylpyrrolidone; agar; carrageenan; gum tragacanth or gum acacia; and petroleum jelly. Typically, the carrier or carriers will form from 10% to 99.9% by weight of the vaccine composition and may be buffered by conventional methods using reagents known in the art, such as sodium hydrogen phosphate, sodium dihydrogen phosphate, potassium hydrogen phosphate, potassium dihydrogen phosphate, a mixture thereof, and the like.

[0198] Examples of adjuvants include, but are not limited to, oil in water emulsions, aluminum hydroxide (alum), immunostimulating complexes, non-ionic block polymers or copolymers, cytokines (like IL-1, IL-2, IL-7, IFN-a, IFN-(3, IFN-γ, etc.), saponins, monophosphoryl lipid A (MLA), muramyl dipeptides (MDP), MCA, and the like. Other suitable adjuvants include, for example, aluminum potassium sulfate, heat-labile or heat-stable enterotoxin(s) isolated from Escherichia coli, cholera toxin or the B subunit thereof, diphtheria toxin, tetanus toxin, pertussis toxin, Freund's incomplete or complete adjuvant, etc. Toxin-based adjuvants, such as diphtheria toxin, tetanus toxin and pertussis toxin may be inactivated prior to use, for example, by treatment with formaldehyde. Further adjuvants may include, but are not limited to, poly-ICLC, 1018 ISS, aluminum salts, Amplivax, AS 15, BCG, CP-870,893, CpG7909, CyaA, dSLIM, GM-CSF, IC30, IC31, Imiquimod, ImuFact IMP321, IS Patch, ISS, ISCOMATRTX, Juvlmmune, LipoVac, MF59, monophosphoryl lipid A, Montanide IMS 1312, Montanide ISA 206, Montanide ISA 50V, Montanide ISA-51, OK-432, OM-174, OM-197-MP-EC, ONTAK, PEPTEL, vector system, PLGA microparticles, resiquimod, SRL172, Virosomes and other Virus-like particles, YF-17D, VEGF trap, R848, beta-glucan, Pam3Cys, and Aquila's QS21 stimulon. In aspects of the pharmaceutical compositions or vaccines as disclosed herein, the adjuvant comprises poly-ICLC. The TLR9 agonist CpG and the synthetic double-stranded RNA (dsRNA) TLR3 ligand poly-ICLC are two of the most promising vaccine adjuvants currently in clinical development. In preclinical studies, poly-ICLC appears to be the most potent TLR adjuvant when compared to LPS and CpG. This appears due to its induction of pro-inflammatory cytokines and lack of stimulation of IL-10, as well as maintenance of high levels of co-stimulatory molecules in DCs. Poly-ICLC is a synthetically prepared double-stranded RNA consisting of polyl and polyC strands of average length of about 5000 nucleotides, which has been stabilized to thermal denaturation and hydrolysis by serum nucleases by the addition of polylysine and carboxymethylcellulose. The compound activates TLR3 and the RNA helicase-domain of MDA5, both members of the PAMP family, leading to DC and natural killer (NK) cell activation and mixed production of type I interferons, cytokines, and chemokines.

[0199] Examples of freeze-drying stabilizer may be for example carbohydrates such as sorbitol, mannitol, starch, sucrose, dextran or glucose, proteins such as albumin or casein, and derivatives thereof.

[0200] Vaccines may additionally comprise at least one immunogen from at least one additional pathogen, e.g., a pig pathogen such as Actinobacillus pleuropneunomia; Adenovirus; Alphavirus such as Eastern equine encephalomyelitis viruses; Balantidium coli; Bordetella bronchiseptica; Brachyspira spp., preferably B. hyodyentheriae, B. pilosicoli, B. innocens, Brucella suis, preferably biovars 1, 2 and 3; Classical swine fever virus, Chlamydia and Chlamydophila spp., preferably C. pecorum and C. abortus; Clostridium spp., preferably Cl. difficile, Cl. perfringens types A, B and C, Cl. novyi, Cl. septicum, Cl. tetani; Digestive and respiratory Coronavirus; Cryptosporidium parvum; Eimeria spp.; Eperythrozoonis suis currently named Mycoplasma haemosuis; Erysipelothrix rhusiopathiae; Escherichia coli; Haemophilus parasuis, preferably subtypes 1, 7 and 14; Hemagglutinating encephalomyelitis virus; lsospora suis; Japanese Encephalitis virus; Lawsonia intracellulars; Leptospira spp., preferably Leptospira australis, Leptospira canicola, Leptospira grippotyphosa, Leptospira icterohaemorrhagicae, Leptospira interrogans, Leptospira Pomona and Leptospira tarassovi; Mannheimia haemolytica; Mycobacterium spp., preferably M. avium, M. intracellular and M. bovis: Mycoplasma hyponeumoniae; Parvovirus; Pasteurella multocida; Porcine circovirus; Porcine cytomegolovirus; Porcine parovirus, Porcine reproductive and respiratory syndrome virus: Pseudorabies virus; Rotavirus; Sagiyama virus; Salmonella spp., preferably S. thyhimurium and S. choleraesuis; Staphylococcus spp., preferably S. hyicus; Streptococcus spp., preferably Strep suis; Swine cytomegalovirus; Swine herpes virus; Swine influenza virus; Swinepox virus; Toxoplasma gondii; Vesicular stomatitis virus and virus of exanthema of swine;

[0201] or other isolates and subtypes of porcine circovirus.

[0202] The vaccine compositions of the instant disclosure may be liquid formulations such as an aqueous solution, water-in-oil or oil-in-water emulsion, syrup, an elixir, a tincture, or a preparation for parenteral, subcutaneous, intradermal, intramuscular or intravenous administration (e.g., injectable administration), such as sterile suspensions or emulsions. Such formulations are known in the art and are typically prepared by dissolution of the antigen and other typical additives in the appropriate carrier or solvent systems. Liquid formulations also may include suspensions and emulsions that contain suspending or emulsifying agents.

[0203] The route of administration can be percutaneous, via mucosal administration, or via a parenteral route (intradermal, intramuscular, subcutaneous, intravenous, or intraperitoneal).

[0204] Vaccine compositions according to the present disclosure may be administered alone, or can be co-administered or sequentially administered with other treatments or therapies. A vaccine of the present disclosure can conveniently be administered intranasally, transdermally (i.e., applied on or at the skin surface for systemic absorption), parenterally, ocularly, etc. The parenteral route of administration includes, but is not limited to, intramuscular, intravenous, intradermal, and intraperitoneal routes and the like. In aspects, vaccines of the present disclosure are administered intradermally, e.g., by using a micro needle patch as is known in the art or by using a commercial needle-free high-pressure device such as Pulse NeedleFree technology (Pulse 50TM Micro Dose Injection System, Pulse NeedleFree Systems; Lenexa, Kans., USA).

[0205] The present disclosure also relates to methods of immunizing or inducing an immune response in animals (e.g., humans) comprising administering to said animal a peptide, polypeptide, concatemeric peptide, chimeric or fusion polypeptide, nucleic acid, cell, vector, pharmaceutical, or vaccine as described above.

[0206] The present disclosure also relates to methods of treating and/or preventing SARS-CoV-2 infection and/or related diseases caused by SARS-CoV-2, including COVID-19, diseases in animals (e.g., humans) comprising administering to said animal a peptide, polypeptide, concatemeric peptide, chimeric or fusion polypeptide, nucleic acid, cell, vector, pharmaceutical, or vaccine as disclosed herein.

[0207] A vaccine of the present disclosure can conveniently be administered intranasally, transdermally (i.e., applied on or at the skin surface for systemic absorption), parenterally, ocularly, etc. The parenteral route of administration includes, but is not limited to, intramuscular, intravenous, and intraperitoneal routes and the like.

[0208] The dosage of the vaccines of the present disclosure will depend on the species, breed, age, size, vaccination history, and health status of the animal (e.g., human) to be vaccinated, as well as the route of administration, e.g., subcutaneous, intradermal, oral intramuscular or intravenous administration. The vaccines of the instant disclosure can be administered as single doses or in repeated doses. The vaccines of the instant disclosure can be administered alone, or can be administered simultaneously or sequentially administered with one or more further compositions, such as other porcine immunogenic or vaccine compositions. Where the compositions are administered at different times, the administrations may be separate from one another or overlapping in time.

[0209] In aspects, the present disclosure includes multiple rounds of administration of the instantly-disclosed vaccine compositions. For example, the vaccine can be boosted at one, two, three, and/or four week intervals.. Such are known in the art to improve or boost the immune system to improve protection against the pathogen. Additionally, the present disclosure may also include assessing a subject's immune system to determine if further administrations of the instantly-disclosed vaccine compositions is warranted. In some aspects, multiple administrations may include the development of a prime boosting strategy of vaccination using the instantly-discloed vaccines (e.g.., polypeptide based or nucleic acid based as disclosed herein). Such may provide an opportunity to produce sequential immunogenic responses against SARS-CoV-2 infection and/or related diseases caused by SARS-CoV-2, including COVID-19. In some aspects, the vaccine can be boosted at 1, 2, 3, 4, 5, or 6 week intervals. In some aspects, the vaccine is boosted at 2 week intervals. In some apsects, the vaccine is boosted at 3 week intervals. In some aspects, peptide based vaccine and nucleice acid (e.g., RNA or DNA) vaccinations can be achieved in an alternative manner to provide a regimen of immunization with the same immunogen presented in different fashions to the subject's immune system.

[0210] In one aspect, the vaccine compositions of the present disclosure are administered to a subject susceptible to or otherwise at risk for SARS-CoV-2 infection and/or related diseases caused by SARS-CoV-2, including COVID-19, to enhance the subject own immune response capabilities. The subject to which the vaccine is administered is, in one aspect, a human. The animal may be susceptible to infection by SARS-CoV-2 infection (or a closely related virus) and/or related diseases caused by SARS-CoV-2, including COVID-19.

[0211] In aspects of a vaccine as described herein, the vaccine may comprise at least 2, at least 3, at least 4, at least 5, at least 6, at least 7, at least 8, at least 9, at least 10, at least 11, at least 12, at least 13, at least 14, at least 15, at least 16, at least 17, at least 18, at least 19, or at least 20 of the instantly-disclosed peptides or polypetides (including concatemeric polypeptides) or nucleic acids encoding such peptides or polypeptides (including concatemeric polypeptides). For example, in aspects, a vaccine can comprise at least 2, at least 3, at least 4, at least 5, at least 6, at least 7, at least 8, at least 9, at least 10, at least 11, at least 12, at least 13, at least 14, at least 15, at least 16, at least 17, at least 18, at least 19, or at least 20 peptides or polypeptides (including up to 40 peptides or polypetides), including any value or range therebetween, comprising, consisting of, or consisting essentially of one or more peptides or polypeptides having an amino acid sequence comprising, consisting of, or consisting essentially of one or more of SEQ ID NOS: 4-1676, 1713-2595, 2605-2638, 2647-2718, and 2735-8692 and/or fragments and variants thereof, and optionally 1 to 12 additional amino acids distributed in any ratio on the N terminus and/or C-terminus of the polypeptide of SEQ ID NOS: 4-1676, 1713-2595, 2605-2638, 2647-2718, and 2735-8692; concatemeric peptides as disclosed herein, including the concatemeric peptides of SEQ ID NOS: 1677-1692, 2593-2604, 2639-2646, and 2719-2734 and nucleic acids (e.g., RNA mRNA, DNA, cDNA) encoding such peptides, polypeptides, or concatemeric peptides, and/or fragments and variants thereof, as described herein.

[0212] The present disclosure also provides a container comprising an immunologically effective amount of a polypeptide, nucleic acid or vaccine as described above. The present disclosure also provides vaccination kits comprising an optionally sterile container comprising an immunologically effective amount of the vaccine, means for administering the vaccine to animals, and optionally an instruction manual including information for the administration of the immunologically effective amount of the composition for treating and/or preventing SARS-CoV-2 infection (or a closely related virus) and/or related diseases caused by SARS-CoV-2, including COVID-19.

### Methods of Treatment

[0213] Stimulating T-cells with T-cell epitope compounds and compositions of the present disclosure can stimulate, induce, and/or expand a corresponding naturally occurring immune response, e.g., stimulating, inducing, and/or expanding a corresponding naturally occurring immune response to a SARS-CoV-2 infection (or a closely related virus such as Severe Acute Respiratory Syndrome (SARS) or Middle East respiratory syndrome coronavirus (MERS-CoV)) and/or related diseases caused by SARS-CoV-2, including COVID-19, including CD4+ and/or CD8+ T cell responses, and in aspects results in increased secretion of one or more cytokines and chemokines. In aspects, T-cells activated by the T-cell epitope compounds and compositions of the present disclosure stimulate cell-mediated immunity against SARS-CoV-2 infection (or a closely related virus such as Severe Acute Respiratory Syndrome (SARS) or Middle East respiratory syndrome coronavirus (MERS-CoV)) and/or related diseases caused by SARS-CoV-2, including COVID-19, in a subject.

[0214] In aspects, T cells activated by the T-cell epitope compounds and compositions of the present disclosure stimulate cell-mediated immunity against SARS-CoV-2 infection (or a closely related virus) and/or related diseases caused by SARS-CoV-2, including COVID-19 in a subject.

[0215] In aspects, the present disclosure is directed to a method of stimulating, inducing, and/or expanding an immune response, e.g., against SARS-CoV-2 infection (or a closely related virus such as Severe Acute Respiratory Syndrome (SARS) or Middle East respiratory syndrome coronavirus (MERS-CoV)) and/or related diseases caused by SARS-CoV-2, including COVID-19, in a subject in need thereof by administering to the subject a therapeutically effect amount of a T-cell epitope composition (compound or composition of the present disclosure.

[0216] In aspects, the present disclosure is directed to a method of preventing, treating, or ameliorating a disease by SARS-CoV-2 infection (or a closely related virus such as Severe Acute Respiratory Syndrome (SARS) or Middle East respiratory syndrome coronavirus (MERS-CoV)) such as COVID-19, in a subject in need thereof by administering to the subject a therapeutically effect amount of a T-cell epitope compound or composition of the present disclosure.

### Assays, Methods, and Kits of the Instant Disclosure

[0217] In aspects, the present disclosure is directed to methods of measuring an immune response, including a CMI response, in a subject by incubating a sample from the subject which comprises T-cells or other cells of the immune system with one or more peptides or polypeptides of the instant disclosure. In aspects, production of IFN-γor other cytokine or immune effector molecule(s) is then detected. The presence or level of immune effector is then indicative of the level of cell mediated responsiveness of the subject. In aspects, preferably, the sample is whole blood which is collected in a suitable container comprising the antigen. Optionally, a simple sugar such as dextrose is added to the incubation mixture. Accordingly, one aspect of the present disclosure relates to a method for measuring a CMI response in a subject, preferably a human subject and more preferably a human subject potentially infected with SARS-CoV-2 or a related coronavirus (such as Severe Acute Respiratory Syndrome (SARS) or Middle East respiratory syndrome coronavirus (MERS-CoV)), said method comprising collecting a sample from said subject wherein said sample comprises cells of the immune system which are capable of producing immune effector molecules following stimulation by an antigen, incubating said sample with one or more peptides of the instant disclosure and then measuring the presence of or elevation in the level of an immune effector molecule wherein the presence or level of said immune effector molecule is indicative of the capacity of said subject to mount a cell-mediated immune response. In aspects, the presence of or elevation in the level of an immune effector molecule wherein the presence or level of said immune effector molecule is indicative of the capacity of said subject to mount a cell-mediated immune response against SARS-CoV-2 or a related coronavirus infection.

[0218] Reference to a “subject” includes a human or non-human species including primates, livestock animals (e.g. sheep, cows, pigs, horses, donkey, goats), laboratory test animals (e.g. mice, rats, rabbits, guinea pigs, hamsters), companion animals (e.g. dogs, cats), avian species (e.g. poultry birds, aviary birds), reptiles and amphibians. The present disclosure has applicability, therefore, in human medicine as well as having livestock and veterinary and wild life applications. Most preferably, however, the subject is a human and the CMI response assay has applications in screening for responsiveness to COVID-19 or related coronavirus infections.

[0219] Reference to “immune cells” includes cells such as lymphocytes including natural killer (NK) cells, T-cells, (CD4+ and/or CD8+ cells), B-cells, macrophages and monocytes, dendritic cells or any other cell which is capable of producing an effector molecule in response to direct or indirect antigen stimulation. Conveniently, the immune cells are lymphocytes and more particularly T-lymphocytes.

[0220] The immune effector molecules may be any of a range of molecules which are produced in response to cell activation or stimulation by an antigen. Although an interferon (IFN) such as IFN-γ is a particularly useful immune effector molecule, others include a range of cytokines such as interleukins (IL), e.g. IL-2, IL-4, IL-10 or IL-12, tumor necrosis factor alpha (TNF-α), a colony stimulating factor (CSF) such as granulocyte (G)-CSF or granulocyte macrophage (GM)-CSF amongst many others such as complement or components in the complement pathway.

[0221] Accordingly, in aspects, the present disclosure provides a method for measuring a CMI response in a subject, said method comprising collecting a sample from said subject wherein said sample comprises cells of the immune system which are capable of producing IFN-γ molecules following stimulation by one or more peptides of the instant disclosure, incubating said sample with one or more peptides of the instant disclosure and then measuring the presence of or elevation in the level of an IFN-γ molecule wherein the presence or level of said IFN-γ molecule is indicative of the capacity of said subject to mount a cell-mediated immune response.

[0222] The sample collected from the subject is generally deposited into a blood collection tube. A blood collection tube includes a blood draw tube or other similar vessel. Conveniently, when the sample is whole blood, the blood collection tube is heparinized. Alternatively, heparin is added to the tube after the blood is collected. Notwithstanding that whole blood is the preferred and most convenient sample, the present invention extends to other samples containing immune cells such as lymph fluid, cerebral fluid, tissue fluid and respiratory fluid including nasal and pulmonary fluid. The use of blood collection tubes is compatible with standard automated laboratory systems and these are amenable to analysis in large-scale and random access sampling. Blood collection tubes also minimize handling costs and reduce laboratory exposure to whole blood and plasma and, hence, reduce the risk of laboratory personnel from contracting a pathogenic agent.

[0223] Combining the incubation step with the collection tube is particularly efficacious and enhances the sensitivity of the assay as does the optional feature of incubating the cells in the presence of a sample sugar such as dextrose.

[0224] The incubation step may be from 5 to 72 hours, more preferably 5 to 40 hours and even more preferably 8 to 24 hours or any value or range therebetween. In aspects, the incubation step is conducted in the presence of a simple sugar such as dextrose.

[0225] Detection of the immune effector molecules may be made at the protein or nucleic acid levels. Consequently, reference to “presence or level of said immune effector molecule” includes direct and indirect data. For example, high levels of IFN-γ mRNA is indirect data showing increased levels of IFN-γ.

[0226] Ligands to the immune effectors are particularly useful in detecting and/or quantitating these molecules. Antibodies to the immune effectors are particularly useful. Techniques for the assays contemplated herein are known in the art and include, for example, sandwich assays, ELISA and ELISpot. Reference to “antibodies” includes parts of antibodies, mammalianized (e.g. humanized) antibodies, recombinant or synthetic antibodies and hybrid and single chain antibodies. It should be understood that a wide range of immunoassay techniques as are known in the art are compatible with the instant disclosure, such as those disclosed in U.S. Pat. No. 7,608,392 (herein incorporated by reference in its entirety).

[0227] In aspects, the present disclosure is directed to methods of assaying for SARS-CoV-2 or a related coronavirus (such as Severe Acute Respiratory Syndrome (SARS) or Middle East respiratory syndrome coronavirus (MERS-CoV)) peptide-specific T-cells, the method comprising providing a fluid containing T-cells, adding one or more peptides or polypeptides of the instant disclosure to the fluid, incubating the fluid to cause cytokine release, and detecting the released cytokine. Preferably the method comprises providing the fluid containing T-cells in contact with a surface carrying an immobilized first antibody to the cytokine, adding the peptide to the fluid, incubating the resulting fluid mixture under conditions to cause any peptide-specific T-cells that have been pre-sensitized in vivo to the peptide to secrete the cytokine, and detecting any secreted cytokine bound to the immobilized first antibody.

[0228] In aspects, the cells are preferably peripheral blood mononuclear cells (PMBC). They may suitably be taken from a patient known to be suffering, or to have suffered, from COVID-19 infection or a related coronavirus infection. In aspects, the cells used are fresh. In aspects, the assay is used to identify or quantitate peptide-specific T-cells e.g. CD8+ or CD4+ cells that have been activated or pre-sensitized in vivo to a particular peptide. In aspects, these are unrestimulated T-cells, i.e. cells capable of immediate effector function without the need to effect division/differentiation by in vitro culture. When a peptide in question is presented to such cells, the cells secrete various cytokines, of which any one may be selected for the purposes of this assay. In aspects, the cytokine selected is interferon-γ (IFN γ). However, although an interferon (IFN) such as IFN-γ is a particularly useful immune effector molecule, others include a range of cytokines such as interleukins (IL), e.g. IL-2, IL-4, IL-10 or IL-12, tumor necrosis factor alpha (TNF-α), a colony stimulating factor (CSF) such as granulocyte (G)-CSF or granulocyte macrophage (GM)-CSF amongst many others.

[0229] The secreted cytokine can be detected by any of a variety of methods known in the literature. Preferably the assay method involves providing a surface carrying an immobilized first antibody to the IFN-γ or other cytokine. A fluid containing the PBMC or other fresh cells is placed in contact with that immobilized antibody. About 30% of the PBMC are CD8+ cells.

[0230] In aspects, the method comprises adding a peptide or polypeptide of the instant disclosure to the fluid. If activated or pre-sensitized peptide-specific T-cells (CD4+ and/or CD8+ T cells) are present in the test fluid, they respond by secreting appropriate effector cytokines, such as IFN-γ or other cytokine, which then becomes bound to the immobilized antibody. In aspects, the one or more peptides or polypeptides of the instant disclosure may be added in uncombined form to the fresh cells. While it is possible to add cultured cells that have been pulsed with such peptides or polypeptides, this is not necessary when using defined peptide/polypeptide epitopes. The peptides/polypeptides should be added in an amount sufficient to generate an observable signal; in aspects a preferred concentration range in the fluid is 0.01 up to 100 μM particularly 0.5-5.0 μM.

[0231] Incubation should be continued for a time sufficient to permit CD8+ and/or CD4+ cells that have been pre-sensitized in vivo to the particular peptide/polypeptide chosen to secrete the IFN-γ or other cytokine. In aspects, the incubation should not continue for so long that quiescent CD8+ and/or CD4+ cells have time to differentiate and become activated by the peptide and start to secrete cytokines. This suggests an incubation time of 4-24 hours, more particularly 6-16 hours. It is an advantage of the invention that the incubation part of the test can be performed in a single working day or overnight, and without the use of sterile conditions required for cell culture in vitro.

[0232] In aspects, during the incubation, any IFN-γor other cytokine secreted by CD8+ and/or CD4+ cells becomes bound to the first antibody immobilized on the surface. After incubation, the surface may be washed to remove unbound material. For detection, in aspects a labelled second antibody to the cytokine is used. When this is applied to the surface it becomes bound to any cytokine present. In aspects, the second antibody should recognize a different epitope from the first antibody. In aspects, one or both of the first and second antibodies may be monoclonal. The label may be any that is conventionally used in the field, including radioisotopes, enzymes to generate color or chemiluminescence, fluorescent groups or groups for detection by mass spectrometry or refractive index (e.g. by surface plasmon resonance). It is convenient but not necessary to use a labelled antibody, any reagent that binds specifically to the cytokine could be labelled and used. Detection and perhaps quantitation of the label is effected by means well known in the field and appropriate to the nature of the label used, and may be those as disclosed in U.S. Pat. No. 7,608,392 (herein incorporated by reference in its entirety).

[0233] In aspects, the assay may conveniently be carried out in a multi-well plate. Each well of the plate has a surface carrying a bound first antibody. To each well is added a fluid containing an appropriate number, e.g. 103-106 of cells. Different peptides and/or controls are added to individual wells of the plate. Cells that secrete a cytokine during incubation show up as spots (spot forming cells or SFCs) and the number or density of these in each well can readily be determined.

[0234] In aspects, the present disclosure provides a method of detecting an anti-SARS-CoV-2 (or related coronavirus, such as Severe Acute Respiratory Syndrome (SARS) or Middle East respiratory syndrome coronavirus (MERS-CoV)) T cell response (which in aspects can included CD4+ and/or CD8+ T cell response) comprising contacting a population of T cells of an individual with a peptide of the instant disclosure, wherein one or more of said peptides may be substituted by an analogue which binds a T cell receptor that recognizes the peptide, and determining whether T cells of the T cell population recognize the peptide(s). Further, in aspects, the present disclosure provides a method of diagnosing a SARS-CoV-2 or related coronavirus infection (such as Severe Acute Respiratory Syndrome (SARS) or Middle East respiratory syndrome coronavirus (MERS-CoV)) and/or related diseases caused by SARS-CoV-2, including COVID-19, in a host, or exposure of a host, to SARS-CoV-2 or related coronavirus, the method comprising (i) contacting a population of T cells from the host with one or more peptides or analogues as disclosed here, and analogues thereof which can bind a T cell receptor which recognizes any of the said peptides; and (ii) determining whether the T cells of said T cell population recognize the peptide(s) and/or analogue(s).

[0235] In aspects, the host is generally a human but may be an animal, typically one which can be naturally or artificially infected by a mycobacterium. The host may be a mammal, such as a primate, cow, sheep, pig, badger or rodent, e.g. a mouse or rat. The host typically has an active or latent SARS-CoV-2 infection or related coronavirus infection, or has had such an infection recently. The host may be a healthy contact who has been exposed to SARS-CoV-2 infection or related coronavirus infection. Thus the method may be used to trace the healthy contacts of individuals with such SARS-CoV-2 infection or related coronavirus infection. The method may also be used to carry out population surveys to measure the number of individuals in a population who have a SARS-CoV-2 infection or related coronavirus infection or are healthy contacts.

[0236] In aspects, the T cells which recognize the peptide in the method are generally T cells which have been pre-sensitized in vivo to antigen from SARS-CoV-2 or related coronavirus. These antigen-experienced T cells are generally present in the peripheral blood of a host which has been exposed to the SARS-CoV-2 infection or related coronavirus infection. The T cells may be CD4+ and/or CD8+ T cells.

[0237] It is understood that the term ‘peptide’ or ‘polypeptide’ also includes the analogue of that peptide (which may not be a peptide as defined by the ordinary use of the term) unless the context requires otherwise.

[0238] In aspects, the T cells can be contacted with the peptides in vitro or in vivo, and determining whether the T cells recognize the peptide can be done in vitro or in vivo. In aspects, determination of whether the T cells recognize the peptide or polypeptide of the instant disclosure is generally done by detecting a change in the state of the T cells in the presence of the peptide or polypeptide or determining whether the T cells bind the peptide or polypeptide. The change in state is generally caused by antigen specific functional activity of the T cell after the T cell receptor binds the peptide or polypeptide. Generally when binding the T cell receptor the peptide is bound to an MHC class II or MHC class I molecule, which is typically present on the surface of an antigen presenting cell (APC).

[0239] In aspects, the change in state of the T cell may be the start of or increase in secretion of a substance from the T cell, such as a cytokine, especially IFN-γ, IL-2 or TNF-α. In aspects, the cytokine selected is interferon-γ (IFN γ). However, although an interferon (IFN) such as IFN-γis a particularly useful immune effector molecule, others include a range of cytokines such as interleukins (IL), e.g. IL-2, IL-4, IL-10 or IL-12, tumor necrosis factor alpha (TNF-α), a colony stimulating factor (CSF) such as granulocyte (G)-CSF or granulocyte macrophage (GM)-CSF amongst many others. The substance can typically be detected by allowing it to bind to a specific binding agent and then measuring the presence of the specific binding agent/substance complex. The specific binding agent is typically an antibody, such as polyclonal or monoclonal antibodies. Antibodies to cytokines are commercially available, or can be made using standard techniques.

[0240] In aspects, the specific binding agent is immobilized on a solid support. After the substance is allowed to bind the solid support can optionally be washed to remove material which is not specifically bound to the agent. In aspects, the agent/substance complex may be detected by using a second binding agent which will bind the complex. Typically the second agent binds the substance at a site which is different from the site which binds the first agent. In aspects, the second agent is preferably an antibody and is labelled directly or indirectly by a detectable label.

[0241] Thus the second agent may be detected by a third agent which is typically labelled directly or indirectly by a detectable label. For example the second agent may comprise a biotin moiety, allowing detection by a third agent which comprises a streptavidin moiety and typically alkaline phosphatase as a detectable label.

[0242] In aspects the detection system which is used is the ex-vivo ELISPOT assay as is known in the art. In such an assay, IFN-γ secreted from the T cell is bound by a first IFN-γ specific antibody which is immobilized on a solid support. The bound IFN-γ is then detected using a second IFN-γ specific antibody which is labelled with a detectable label.

[0243] In aspects, the change in state of the T cell which can be measured may be the increase in the uptake of substances by the T cell, such as the uptake of thymidine. The change in state may be an increase in the size of the T cells, or proliferation of the T cells, or a change in cell surface markers on the T cell.

[0244] In aspects, the T cells which are contacted in the assay/methods are taken from the host in a blood sample, although other types of samples which contain T cells can be used. The sample may be added directly to the assay or may be processed first. Typically the processing may comprise diluting of the sample, for example with water or buffer. Typically the sample is diluted from 1.5 to 100 fold, for example 2 to 50 or 5 to 10 fold. In aspects, the processing may comprise separation of components of the sample. Typically mononuclear cells (MCs) are separated from the samples. The MCs will comprise the T cells and APCs. Thus in the method the APCs present in the separated MCs can present the peptide to the T cells. In aspects, only T cells, such as only CD4+ and/or only CD8+ T cells, can be purified from the sample. PBMCs, MCs and T cells can be separated from the sample using techniques known in the art.

[0245] In aspects, the T cells used in the assay/methods are in the form of unprocessed or diluted samples, or are freshly isolated T cells (such as in the form of freshly isolated MCs or PBMCs) which are used directly ex vivo, i.e. they are not cultured before being used in the method. However the T cells can be cultured before use, for example in the presence of one or more of the peptides, and generally also exogenous growth promoting cytokines. During culturing the peptides are typically present on the surface of APCs, such as the APC used in the method. Pre-culturing of the T cells may lead to an increase in the sensitivity of the method. Thus the T cells can be converted into cell lines, such as short term cell lines.

[0246] In aspects, the APC which is typically present in the assays/methods may from the same host as the T cell or from a different host. In aspects, the APC may be a naturally occurring APC or an artificial APC. In aspects, the APC is a cell which is capable of presenting the peptide to a T cell. It is typically a B cell, dendritic cell or macrophage. It is typically separated from the same sample as the T cell and is typically co-purified with the T cell. Thus the APC may be present in MCs or PBMCs. In aspects, the APC is typically a freshly isolated ex vivo cell or a cultured cell.

[0247] It may be in the form of a cell line, such as a short term or immortalized cell line. The APC may express empty MHC class II molecules or MHC class I molecules on its surface.

[0248] In aspects of the assays/methods, the T cells derived from the sample can be placed into an assay with all the peptides (i.e. a pool of the peptides) which it is intended to test (the relevant panel) or the T cells can be divided and placed into separate assays each of which contain one or more of the peptides. In aspects, in the in vitro or in vivo forms of the methods/assays at least one or more of the instantly disclosed peptides/polypeptides as described herein or analogues thereof are used.

[0249] In aspects, one or more peptides or polypeptides as disclosed herein is added directly to an assay comprising T cells and APCs. As discussed above the T cells and APCs in such an assay could be in the form of MCs. When peptides which can be recognized by the T cell without the need for presentation by APCs are used then APCs are not required. Analogues which mimic the original peptide bound to a MHC molecule are an example of such a peptide. In aspects, the peptide or polypeptide is provided to the APC in the absence of the T cell. The APC is then provided to the T cell, typically after being allowed to present the peptide on its surface. The peptide may have been taken up inside the APC and presented, or simply be taken up onto the surface without entering inside the APC.

[0250] In aspects, the duration for which the peptide or polypeptide is contacted with the T cells will vary depending on the method used for determining recognition of the peptide. Typically 10⁵ to 10⁷, preferably 5×10⁵ to 10⁶ PBMCs are added to each assay. In the case where a peptide is added directly to the assay its concentration is from 10⁻to 10³ μg/ml, preferably 0.5 to 50 g/ml or 1 to 10 μg/ml. In aspects, the length of time for which the T cells are incubated with a peptide or polypeptide is from 4 to 24 hours, preferably 6 to 16 hours.

[0251] In aspects, the determination of the recognition of a peptide or polypeptide of the instant disclosure by the T cells may be done by measuring the binding of the peptide to the T cells. Typically T cells which bind the peptide can be sorted based on this binding, for example using a FACS machine. The presence of T cells which recognize the peptide will be deemed to occur if the frequency of cells sorted using the peptide is above a ‘control’ value. The frequency of antigen-experienced T cells is generally 1 in 10⁶ to 1 in 10³, and therefore whether or not the sorted cells are antigen-experienced T cells can be determined.

[0252] In aspects, the determination of the recognition of the peptide by the T cells may be measured in vivo. In aspects, a peptide or polypeptide of the instant disclosure is administered to the host and then a response which indicates recognition of the peptide or polypeptide may be measured. In aspects, the peptide is administered intradermally, typically in a similar manner to the Mantoux test. In aspects, the peptide may be administered epidermally. In aspects, peptide is administered by needle, such as by injection, but can be administered by other methods such as ballistics, for example the ballistics techniques which have been used to deliver nucleic acids. EP-A-0693119 describes techniques which can typically be used to administer the peptide. In aspects, from 0.001 to 1000 μg, for example from 0.01 to 100 μg or 0.1 to 10 μg of peptide is administered.

[0253] Alternatively an agent can be administered which is capable of providing the peptides in vivo. Thus a polynucleotide capable of expressing the peptide can be administered, typically in any of the ways described above for the administration of the peptide. In aspects, the polynucleotide has any of the characteristics of the polynucleotide provided by the invention which is discussed below. In aspects, the peptide is expressed from the polynucleotide in vivo and recognition of the peptide in vivo is measured. In aspects, from 0.001 to 1000 μg, for example from 0.01 to 100 μg or 0.1 to 10 μg of polynucleotide is administered. Recognition of the peptide in vivo is typically indicated by the occurrence of a response.

[0254] The analogue which can be used in the assays/methods can bind to a T cell receptor which recognizes the equivalent peptide or polypeptide of the instant disclosure. Therefore generally when the analogue is added to T cells in the presence of the equivalent said peptide or polypeptide, typically also in the presence of an APC, the analogue inhibits the recognition of the equivalent peptide or polypeptide. In aspects, the binding of the analogue to the said T cell receptors can be tested by standard techniques. For example T cell receptors can be isolated from T cells which have been shown to recognize the peptide or polypeptide (e.g. using the assays/methods of the instant disclosure). In aspects, demonstration of the binding of the analogue to the T cell receptors can then shown by determining whether the T cell receptors inhibit the binding of the analogue to a substance that binds the analogue, e.g. an antibody to the analogue. In aspects, the analogue is bound in an MHC molecule in such an inhibition of binding assay.

[0255] In aspects, the analogue inhibits the binding of the peptide to a T cell receptor. In this case the amount of peptide which can bind the T cell receptor in the presence of the analogue is decreased. This is because the analogue is able to bind the T cell receptor and therefore competes with the peptide for binding to the T cell receptor.

[0256] T cells for use in the above binding experiments can be isolated from patients with COVID-19 or related coronavirus infection, for example with the aid of the method of the instant disclosure.

[0257] Other binding characteristics of the analogue are also the same as the corresponding peptide or polypeptide of the instant disclosure, and thus typically the analogue binds to the same MHC class II molecule or MHC class I molecule which the peptide or polypeptide of the instant disclosure binds.

[0258] The analogue is typically a peptide or polypeptide. It may have homology with the equivalent original peptide or polypeptide of the instant disclosure. A peptide or polypeptide which is homologous to another peptide or polypeptide is typically at least 70% homologous to the peptide, preferably at least 80 or 90% and more preferably at least 95%, 97% or 99% homologous thereto, for example over a region of at least 15, preferably at least 30, for instance at least 40, 60 or 100 or more contiguous amino acids. Methods of measuring protein homology are well known in the art and it will be understood by those of skill in the art that in the present context, homology is calculated on the basis of amino acid identity (sometimes referred to as “hard homology”). For example the UWGCG Package provides the BESTFIT program which can be used to calculate homology (for example used on its default settings) (Devereux et al (1984) Nucleic Acids Research 12, p 387-395).

[0259] The homologous peptides or polypeptides may differ by substitution, insertion or deletion, for example from 1, 2, 3, 4, 5, 6, 7, 8 or more substitutions, deletions or insertions, which can be at the N or C terminal or at any other position in the sequence. The substitutions are preferably conservative. Typically seen as conservative substitutions are the replacements, one for another, among the aliphatic amino acids Ala, Val, Leu, Met, and Ile; interchange of the hydroxyl residues Ser and Thr, exchange of the acidic residues Asp and Glu, substitution between the amide residues Asn and Gln, exchange of the basic residues His, Lys and Arg and replacements among the aromatic residues Trp, Phe and Tyr.

[0260] The analogue is typically from 8 to 80 amino acids in length, such as 10 to 60 or 12 to 50, preferably 15 to 30 or 20 to 25. In aspects, the amino acids in the analogue at the equivalent positions to amino acids in the original peptide or polypeptide which contribute to binding the MHC molecule or are responsible for the recognition by the T cell receptor, are the same or are conserved.

[0261] In aspects, the analogue peptide comprises one or more modifications, which may be natural post-translation modifications or artificial modifications. The modification may provide a chemical moiety (typically by substitution of a hydrogen, e.g. of a C—H bond), such as an amino, acetyl, hydroxy or halogen (e.g. fluorine) group or carbohydrate group. In aspects, the modification is present on the N or C terminus. In aspects, the analogue may comprise one or more non-natural amino acids, for example amino acids with a side chain different from natural amino acids. Generally, the non-natural amino acid will have an N terminus and/or a C terminus. The non-natural amino acid may be an L-amino acid. In aspects, the analogue has a shape, size, flexibility or electronic configuration which is substantially similar to the original peptide or polypeptide. It is typically a derivative of the original peptide or polypeptide.

[0262] In aspects, the analogue is or mimics the original peptide bound to a MHC class II molecule or a MHC class I molecule. In aspects, the analogue may be or may mimic the original peptide bound to 2, 3, 4 or more MHC class II molecules or MHC class I molecules associated or bound to each other. In aspects, these MHC molecules may be bound together using a biotin/streptavidin based system, in which typically 2, 3 or 4 biotin labelled MHC molecules bind to a streptavidin moiety. This analogue typically inhibits the binding of the peptides or polypeptides. In aspects, class II or class I complex to a T cell receptor or antibody which is specific for the complex. In aspects, the analogue is an antibody or a fragment of an antibody, such as a Fab or (Fab)2 fragment.

[0263] In aspects, the analogue may be immobilized on a solid support, particularly an analogue which mimics peptide bound to a MHC molecule.

[0264] In aspects, the analogue is designed by computational means and then synthesized using methods known in the art. Alternatively the analogue can be selected from a library of compound. The library may be a combinatorial library or a display library, such as a phage display library. The library of compounds may be expressed in the display library in the form of being bound to a MHC class II molecule or MHC class I molecule, such as the MHC molecule which the original peptide binds. Analogues are generally selected from the library based on their ability to mimic the binding characteristics of the original peptides. Thus they may be selected based on ability to bind a T cell receptor or antibody which recognizes the original peptide.

[0265] The present disclosure also provides a kit for carrying out the above-methods and assays comprising one or more of the peptides or analogues as disclosed herein, and optionally a means to detect the recognition of the peptide by the cells of the immune system, such as T cells. In aspects, the means to detect recognition allows or aids detection based on the techniques discussed above, however other detection means in the art may used, such as those disclosed in U.S. Pat. No. 7,608,392 (herein incorporated by reference in its entirety). Thus the means may allow detection of a substance secreted by the T cells after recognition. The kit may thus additionally include a specific binding agent for the substance, such as an antibody. In aspects, the agent is specific for IFN-γ, however agents listed for other cytokines as described above may be used. In aspects, the agent is immobilized on a solid support, which means that after binding the agent the substance will remain in the vicinity of the T cell which secreted it. Thus ‘spots’ of substance/agent complex are formed on the support, each spot representing a T cell which is secreting the substance. Quantifying the spots, and typically comparing against a control, allows determination of recognition of the peptide.

[0266] In aspects, the kit may also comprise a means to detect the substance/agent complex. A detectable change may occur in the agent itself after binding the substance, such as a color change.

[0267] Alternatively a second agent directly or indirectly labelled for detection may be allowed to bind the substance/agent complex to allow the determination of the spots. As discussed above the second agent may be specific for the substance, but binds a different site on the substance than the first agent. In aspects, the means to detect recognition allows or aids detection based on the techniques discussed above, however other detection means in the art may used, such as those disclosed in U.S. Pat. No. 7,608,392 (herein incorporated by reference in its entirety). In aspects, the immobilized support may be a plate with wells, such as a microtitre plate. Each assay can therefore be carried out in a separate well in the plate.

[0268] In aspects, the kit may additionally comprise medium for the cells of the immune system, such as T cells, detection agents, and/or washing buffers to be used in the detection steps. In aspects, the kit may additionally comprise reagents suitable for the separation from the sample, such as the separation of PBMCs or T cells from the sample. In aspects, the kit may be designed to allow detection of the T cells directly in the sample without requiring any separation of the components of the sample.

[0269] In aspects, the kit may comprise an instrument which allows administration of the peptide, such as intradermal or epidermal administration. Typically such an instrument comprises one or more needles. The instrument may allow ballistic delivery of the peptide. The peptides or polypeptides in the kit may be in the form of a pharmaceutical composition.

[0270] In aspects, the kit may also comprise controls, such as positive or negative controls. In aspects, the positive control may allow the detection system to be tested. Thus the positive control typically mimics recognition of the peptides or polypeptides in any of the above assays or methods. In aspects of the kit designed to determine recognition in vitro the positive control is a cytokine. In aspects of the kit designed to detect in vivo recognition of the peptide the positive control may be antigen to which most individuals should response.

[0271] In aspects, the kit may also comprise a means to take a sample containing immune cells, such as T cells, from the host/subject, such as a blood sample. In aspects, the kit may comprise a means to separate mononuclear cells or T cells from a sample from the host. In aspect, the kit is conveniently in compartmental form with one or more compartments adapted to receive a sample from a subject such as whole blood. That compartment or another compartment may also be adapted to contain heparin where the sample is whole blood with or without a simple sugar such as dextrose. The simple sugar may also be maintained in a separate container.

[0272] In aspects, the kit is in a form which is packaged for sale with a set of instructions. The instructions would generally be in the form to conduct the assays and/or methods as disclosed herein.

[0273] Although any assay, methods, and materials similar or equivalent to those described herein can be used in the practice or testing of the present disclosure, the preferred methods and materials are described. Other features, objects, and advantages of the present disclosure will be apparent from the description and the claims. In the specification and the appended claims, the singular forms include plural referents unless the context clearly dictates otherwise. Unless defined otherwise, all technical and scientific terms used herein have the same meaning as commonly understood by one of ordinary skill in the art to which this invention belongs. All references cited herein are incorporated herein by reference in their entirety and for all purposes to the same extent as if each individual publication, patent, or patent application was specifically and individually indicated to be incorporated by reference in its entirety for all purposes.

### Aspects

[0274] A 1st aspect is directed to a polypeptide consisting of an amino acid sequence selected from the group consisting of SEQ ID NOS: 4-1676, 1713-2595, 2605-2638, 2647-2718, and 2735-8692, and/or fragments and variants thereof, and optionally 1 to 12 additional amino acids distributed in any ratio on the N terminus and/or C-terminus of the polypeptide of SEQ ID NOS: 4-1676, 1713-2595, 2605-2638, 2647-2718, and 2735-8692.

[0275] A 2nd aspect is directed to a polypeptide consisting essentially of an amino acid sequence selected from the group consisting of SEQ ID NOS: 4-1676, 1713-2595, 2605-2638, 2647-2718, and 2735-8692, and/or fragments and variants thereof, and optionally 1 to 12 additional amino acids distributed in any ratio on the N terminus and/or C-terminus of the polypeptide of SEQ ID NOS: 4-1676, 1713-2595, 2605-2638, 2647-2718, and 2735-8692.

[0276] A 3rd aspect is directed to a polypeptide comprising an amino acid sequence selected from the group consisting of SEQ ID NOS: 4-1676, 1713-2595, 2605-2638, 2647-2718, and 2735-8692, and/or fragments and variants thereof, and optionally 1 to 12 additional amino acids distributed in any ratio on the N terminus and/or C-terminus of the polypeptide of SEQ ID NOS: 4-1676, 1713-2595, 2605-2638, 2647-2718, and 2735-8692.

[0277] A 4th aspect is directed to a polypeptide according to any one of apects 1-3, wherein said variant or fragment of an amino acid sequence selected from the group consisting of SEQ ID NOS: 4-1676, 1713-2595, 2605-2638, 2647-2718, and 2735-8692 retains MHC binding propensity and TCR specificity, and/or retains anti-SARS-CoV-2 activity.

[0278] A 5^{th} aspect is directed to a polypeptide consisting of an amino acid sequence having at least 75%, 80%, 85%, 90%, or 95% homology to any one of SEQ ID NOS: 4-1676, 1713-2595, 2605-2638, 2647-2718, and 2735-8692, and fragments thereof, wherein said polypeptide retains MHC binding propensity and the same TCR specificity, and/or retains anti-SARS-CoV-2 activity.

[0279] A 6^{th} aspect is directed to a polypeptide consisting essentially of an amino acid sequence having at least 75%, 80%, 85%, 90%, or 95% homology to any one of SEQ ID NOS: 4-1676, 1713-2595, 2605-2638, 2647-2718, and 2735-8692, and fragments thereof, wherein said polypeptide retains MHC binding propensity and the same TCR specificity, and/or retains anti-SARS-CoV-2 activity.

[0280] A 7^{th} aspect is directed to a polypeptide comprising an amino acid sequence having at least 75%, 80%, 85%, 90%, or 95% homology to any one of SEQ ID NOS: 4-1676, 1713-2595, 2605-2638, 2647-2718, and 2735-8692, and fragments thereof, wherein said polypeptide retains MEW binding propensity and the same TCR specificity, and/or retains anti-SARS-CoV-2 activity.

[0281] An 8^{th} aspect is directed to a polypeptide comprising an amino acid sequence selected from the group consisting of SEQ ID NOS: 1677-1692, 2593-2604, 2639-2646, and 2719-2734, and fragments or variants thereof.

[0282] A 9^{th} aspect is directed to a polypeptide according to aspect 8, wherein said fragment or variant of a polypeptide comprising an amino acid sequence selected from the group consisting of SEQ ID NOS: 1677-1692, 2593-2604, 2639-2646, and 2719-2734 retains anti-SARS-CoV-2 activity.

[0283] A 10^{th} aspect is directed to a nucleic acid encoding a polypeptide consisting of an amino acid sequence selected from the group consisting of SEQ ID NOS: 4-1676, 1713-2595, 2605-2638, 2647-2718, and 2735-8692, and/or fragments and variants thereof, and optionally 1 to 12 additional amino acids distributed in any ratio on the N terminus and/or C-terminus of the polypeptide of SEQ ID NOS: 4-1676, 1713-2595, 2605-2638, 2647-2718, and 2735-8692.

[0284] A 11^{th} aspect is directed to a nucleic acid encoding a polypeptide consisting essentially of an amino acid sequence selected from the group consisting of SEQ ID NOS: 4-1676, 1713-2595, 2605-2638, 2647-2718, and 2735-8692, and/or fragments and variants thereof, and optionally 1 to 12 additional amino acids distributed in any ratio on the N terminus and/or C-terminus of the polypeptide of SEQ ID NOS: 4-1676, 1713-2595, 2605-2638, 2647-2718, and 2735-8692.

[0285] A 12^{th} aspect is directed to a nucleic acid encoding a polypeptide comprising an amino acid sequence selected from the group consisting of SEQ ID NOS: 4-1676, 1713-2595, 2605-2638, 2647-2718, and 2735-8692, and/or fragments and variants thereof, and optionally 1 to 12 additional amino acids distributed in any ratio on the N terminus and/or C-terminus of the polypeptide of SEQ ID NOS: 4-1676, 1713-2595, 2605-2638, 2647-2718, and 2735-8692.

[0286] A 13^{th} aspect is directed to a nucleic acid encoding a polypeptide comprising an amino acid selected from the group consisting of SEQ ID NOS: 1677-1692, 2593-2604, 2639-2646, and 2719-2734 and/or fragments and variants thereof.

[0287] A 14^{th} aspect is directed to a nucleic acid consisting of a sequence selected from the group consisting of SEQ ID NOS: 1677-1692, 2593-2604, 2639-2646, and 2719-2734 and fragments or variants thereof.

[0288] A 15^{th} aspect is directed to a nucleic acid consisting essentially of a sequence selected from the group consisting of SEQ ID NOS: 1677-1692, 2593-2604, 2639-2646, and 2719-2734, and fragments or variants thereof.

[0289] A 16^{th} aspect is directed to a nucleic acid comprising a sequence selected from the group consisting of SEQ ID NOS: 1677-1692, 2593-2604, 2639-2646, and 2719-2734, and fragments or variants thereof.

[0290] A 17^{th} aspect is directed to a nucleic acid of any one of aspects 10-12, wherein said fragment or variant of the nucleic acid encoding a polypeptide comprising an amino acid sequence selected from the group consisting of SEQ ID NOS: 4-1676, 1713-2595, 2605-2638, 2647-2718, and 2735-8692 encodes a polypeptide that retains anti-SARS-CoV-2 activity.

[0291] A 18^{th} aspect is directed to a nucleic acid of aspect 13, wherein said fragment or variant of the nucleic acid encoding a polypeptide comprising an amino acid selected from the group consisting of SEQ ID NOS: 1677-1692, 2593-2604, 2639-2646, and 2719-2734 encodes a polypeptide that retains anti-SARS-CoV-2 activity.

[0292] A 19^{th} aspect is directed to a polypeptide or nucleic acid of any one of aspects 1-7, 10-12, or 17, wherein said polypeptide is one or more Class II polypeptides (“clusters”) of Table 1, (and/or fragments or variants thereof), and optionally 1 to 12 additional amino acids distributed in any ratio on the N terminus and/or C-terminus of a polypeptide of Table 1.

[0293] A 20^{th} aspect is directed to a polypeptide or nucleic acid of any one of aspects 1-7, 10-12, or 17, wherein said polypeptide is one or more Class II polypeptides (“clusters”) comprising, consisting, or consisting essentially of an amino acid sequence of SEQ ID NOS: 1091, 1401, 1062, 1373, 1085, 1395, 1066, 1376, 1080, 1391, 1081, 1392, 1065, 1376, 1092, 1403, 1104, 1415, 1071, 1382, 1107, 1418, 1072, 1383, 1074, 1384, 1115, 1426, 1096, 1407, 1110, 1421, 1116, 1427, 1105, 1416, 1055, 1366, 1070, and 1381 (and/or fragments or variants thereof), and optionally 1 to 12 additional amino acids distributed in any ratio on the N terminus and/or C-terminus of the polypeptide of SEQ ID NOS: 1091, 1401, 1062, 1373, 1085, 1395, 1066, 1376, 1080, 1391, 1081, 1392, 1065, 1376, 1092, 1403, 1104, 1415, 1071, 1382, 1107, 1418, 1072, 1383, 1074, 1384, 1115, 1426, 1096, 1407, 1110, 1421, 1116, 1427, 1105, 1416, 1055, 1366, 1070, and 1381.

[0294] A 21^{st} aspect is directed to a polypeptide or nucleic acid of any one of aspects 1-7, 10-12, or 17, wherein said polypeptide is one or more Class II polypeptides (“clusters”) comprising, consisting, or consisting essentially of an amino acid sequence of SEQ ID NOS: 1055, 1366, 1060, 1371, 1061, 1372, 1062, 1373, 1065, 1376, 1066, 1376, 1069, 1380, 1070, 1381, 1071 1382, 1072, 1383, 1074, 1384, 1078, 1389, 1080, 1391, 1081, 1392, 1082, 1393, 1085, 1395, 1086 1397, 1087, 1398, 1088, 1399, 1089, 1400, 1091, 1401, 1092, 1403, 1093, 1404, 1096, 1407, 1100 1411, 1104, 1415, 1105, 1416, 1106, 1417, 1107, 1418, 1110, 1421, 1113, 1424, 1115, 1426, 1116, and 1427 (and/or fragments or variants thereof), and optionally 1 to 12 additional amino acids distributed in any ratio on the N terminus and/or C-terminus of the polypeptide of SEQ ID NOS: 1055, 1366, 1060, 1371, 1061, 1372, 1062, 1373, 1065, 1376, 1066, 1376, 1069, 1380, 1070, 1381, 1071 1382, 1072, 1383, 1074, 1384, 1078, 1389, 1080, 1391, 1081, 1392, 1082, 1393, 1085, 1395, 1086 1397, 1087, 1398, 1088, 1399, 1089, 1400, 1091, 1401, 1092, 1403, 1093, 1404, 1096, 1407, 1100 1411, 1104, 1415, 1105, 1416, 1106, 1417, 1107, 1418, 1110, 1421, 1113, 1424, 1115, 1426, 1116, and 1427.

[0295] A 22^{nd} aspect is directed to a polypeptide or nucleic acid of any one of aspects 1-7, 10-12, or 17, wherein said polypeptide is one or more Class II polypeptides (“clusters”) comprising, consisting, or consisting essentially of an amino acid sequence of SEQ ID NOS: 1062 1373, 1066. 1377, 1079, 1390, 1080, 1391, 1085, 1396, 1124, 1435, 1127, 1438, 1132, 1443, 1134, 1445, 1136, 1447, 2677, 2678, 1140, 1451, 1148, 1459, 1184, 1495, 1185, 1496, 1197, 1507, 1203, 1514, 2679, 2680, 2681, 2682, 1220, 1531, 1222, 1533, 1223, 1534, 2683, 2684, 1234, 1555, 2689, 3690, 1247, 1558, 1250, 1561, 1254, 1565, 2697, 2698, 1261, 1571, 1267, 1578, 1268, 1579, 1270, 1581, 1273, 1584, 1293, 1604, 1300, 1611, 1309, 1619, 1311, 1622, 1314, 1625, 1319, 1630, 2693, 2694, 1333, 1644, 2695, 2696, 1335, 1646, 1337, 1648, 1344, 1655, 1348, 1659, 1351, 1662, 1363 1674, 1365 and 1676 (and/or fragments or variants thereof), and optionally 1 to 12 additional amino acids distributed in any ratio on the N terminus and/or C-terminus of the polypeptide of SEQ ID NOS: 1062 1373, 1066. 1377, 1079, 1390, 1080, 1391, 1085, 1396, 1124, 1435, 1127, 1438, 1132, 1443, 1134, 1445, 1136, 1447, 2677, 2678, 1140, 1451, 1148, 1459, 1184, 1495, 1185, 1496, 1197, 1507, 1203, 1514, 2679, 2680, 2681, 2682, 1220, 1531, 1222, 1533, 1223, 1534, 2683, 2684, 1234, 1555, 2689, 3690, 1247, 1558, 1250, 1561, 1254, 1565, 2697, 2698, 1261, 1571, 1267, 1578, 1268, 1579, 1270, 1581, 1273, 1584, 1293, 1604, 1300, 1611, 1309, 1619, 1311, 1622, 1314, 1625, 1319, 1630, 2693, 2694, 1333, 1644, 2695, 2696, 1335, 1646, 1337, 1648, 1344, 1655, 1348, 1659, 1351, 1662, 1363 1674, 1365 and 1676.

[0296] A 23^{rd} aspect is directed to to a polypeptide or nucleic acid of any one of aspects 1-7, 10-12, or 17, wherein said polypeptide is one or more Class II polypeptides (“clusters”) comprising, consisting, or consisting essentially of an amino acid sequence of SEQ ID NOS: 2647, 2648, 2649, 2650, 2651, 2652, 2653, 2654, 2655, 2656, 2657, 2658, 2659, 2660, 2661, 2662, 1092, 1403, 2663, 2664, 1093, 1404, 2665, 2666, 2667, 2668, 2669, 2670, 2671, 2672, 1098, 1409, 2673, and 2674 (and/or fragments or variants thereof), and optionally 1 to 12 additional amino acids distributed in any ratio on the N terminus and/or C-terminus of the polypeptide of SEQ ID NOS: 2647, 2648, 2649, 2650, 2651, 2652, 2653, 2654, 2655, 2656, 2657, 2658, 2659, 2660, 2661, 2662, 1092, 1403, 2663, 2664, 1093, 1404, 2665, 2666, 2667, 2668, 2669, 2670, 2671, 2672, 1098, 1409, 2673, and 2674.

[0297] A 24^{th} aspect is directed to to a polypeptide or nucleic acid of any one of aspects 1-7, 10-12, or 17, wherein said polypeptide is one or more Class II polypeptides (“clusters”) comprising, consisting, or consisting essentially of an amino acid sequence of SEQ ID NOS: 1071, 1382, 1087, 1398, 2675, 2676, 1124, 1435, 1155, 1466, 1170, 1481, 1174, 1485, 1181, 1492, 1190, 1501, 1192, 1503, 1193, 1504, 2687, 2688, 2685, 2686, 1240, 1551, 1253, 1564, 1255, 1566, 1262, 1573, 1267, 1578, 2691, 2692, 1295, 1606, 1310, 1621, 1344, 1655, 1348, 1659, 1352, 1663, 2699, and 2700 (and/or fragments or variants thereof), and optionally 1 to 12 additional amino acids distributed in any ratio on the N terminus and/or C-terminus of the polypeptide of SEQ ID NOS: 1071, 1382, 1087, 1398, 2675, 2676, 1124, 1435, 1155, 1466, 1170, 1481, 1174, 1485, 1181, 1492, 1190, 1501, 1192, 1503, 1193, 1504, 2687, 2688, 2685, 2686, 1240, 1551, 1253, 1564, 1255, 1566, 1262, 1573, 1267, 1578, 2691, 2692, 1295, 1606, 1310, 1621, 1344, 1655, 1348, 1659, 1352, 1663, 2699, and 2700.

[0298] A 25^{th} aspect is directed to to a polypeptide or nucleic acid of any one of aspects 1-7, 10-12, or 17, wherein said polypeptide is one or more Class I polypeptides (9-mers or 1 Omers) comprising, consisting, or consisting essentially of an amino acid sequence of SEQ ID NOS: 2735-8540 (and/or fragments or variants thereof), and optionally 1 to 12 additional amino acids distributed in any ratio on the N terminus and/or C-terminus of the polypeptide of SEQ ID NOS: 2735-8540.

[0299] A 26^{th} aspect is directed to to a polypeptide or nucleic acid of any one of aspects 1-7, 10-12, or 17, wherein said polypeptide is one or more Class I polypeptides (9-mers) comprising, consisting, or consisting essentially of an amino acid sequence of SEQ ID NOS: 8541-8690 (and/or fragments or variants thereof), and optionally 1 to 12 additional amino acids distributed in any ratio on the N terminus and/or C-terminus of the polypeptide of SEQ ID NOS: 8541-8690.

[0300] A 27^{th} aspect is directed to a polypeptide or nucleic acid of any one of aspects 8-9, or 13-16, or 18, wherein said polypeptide is one or more polypeptides comprising, consisting, or consisting essentially of an amino acid sequence of one or more of SEQ ID NOS: 1677-1681 and 2641-2646.

[0301] A 28^{th} aspect is directed to a polypeptide or nucleic acid of any one of aspects 8-9, or 13-16, or 18, wherein said polypeptide is one or more polypeptides comprising, consisting, or consisting essentially of an amino acid sequence of one or more of SEQ ID NOS: 2723-2734.

[0302] A 29^{th} aspect is directed to a polypeptide or nucleic acid of any one of aspects 8-9, or 13-16, or 18, wherein said polypeptide is one or more polypeptides comprising, consisting, or consisting essentially of an amino acid sequence of one or more of SEQ ID NOS: 2639-2640.

[0303] A 30^{th} aspect is directed to a polypeptide or nucleic acid of any one of aspects 8-9, or 13-16, or 18, wherein said polypeptide is one or more polypeptides comprising, consisting, or consisting essentially of an amino acid sequence of one or more of SEQ ID NOS: 1685-1692.

[0304] A 31^{st} aspect is directed to a polypeptide or nucleic acid of any one of aspects 8-9, or 13-16, or 18, wherein said polypeptide is one or more polypeptides comprising, consisting, or consisting essentially of an amino acid sequence of one or more of SEQ ID NOS: 2593-2604.

[0305] A 32^{nd} aspect is directed to a polypeptide or nucleic acid of any one of aspects 8-9, or 13-16, or 18, wherein said polypeptide is one or more polypeptides comprising, consisting, or consisting essentially of an amino acid sequence of one or more of SEQ ID NOS: 2719-2722.

[0306] A 33^{rd} aspect is directed to a plasmid comprising a nucleic acid of any one of aspects 10-32.

[0307] A 34^{th} aspect is directed to a vector comprising a nucleic acid according to any one of aspects 10-32.

[0308] A 35^{th} aspect is directed to a pharmaceutical composition comprising a polypeptide according to any one of aspects 1-9 or 19-32 and a pharmaceutically-acceptable carrier and/or excipient.

[0309] A 36^{th} aspect is directed to a pharmaceutical composition comprising a nucleic acid according to any one of aspects 10-32 and a pharmaceutically-acceptable carrier and/or excipient.

[0310] A 37^{th} aspect is directed to a pharmaceutical composition comprising a plasmid according to aspect 33 and a pharmaceutically-acceptable carrier and/or excipient.

[0311] A 38^{th} aspect is directed to a pharmaceutical composition comprising a vector according to aspect 34 and a pharmaceutically-acceptable carrier and/or excipient.

[0312] A 39^{th} aspect is directed to a vaccine comprising a polypeptide according to any one of aspects 1-9 or 19-32 and a pharmaceutically-acceptable excipient, carrier, and/or adjuvant.

[0313] A 40^{th} aspect is directed to a vaccine comprising a nucleic acid according to any one of aspects 10-32 and a pharmaceutically-acceptable excipient, carrier, and/or adjuvant.

[0314] A 41^{st} aspect is directed to a vaccine comprising a plasmid according to aspect 33 and a pharmaceutically-acceptable excipient, carrier, and/or adjuvant.

[0315] A 42^{nd} aspect is directed to a vaccine comprising a vector according to aspect 34 and a pharmaceutically-acceptable excipient, carrier, and/or adjuvant.

[0316] A 43^{rd} aspect is directed to a method for inducing immunity against SARS-CoV-2 infection (or a closely related virus such as Severe Acute Respiratory Syndrome (SARS) or Middle East respiratory syndrome coronavirus (MERS-CoV)) and/or related diseases caused by SARS-CoV-2, including COVID-19 in a subject in need thereof, the method comprising administering to the subject a therapeutically effective amount of a polypeptide according to any one of aspects 1-9 or 19-32.

[0317] A 44^{th} aspect is directed to a method for inducing immunity against a SARS-CoV-2 infection (or a closely related virus such as Severe Acute Respiratory Syndrome (SARS) or Middle East respiratory syndrome coronavirus (MERS-CoV)) and/or related diseases caused by SARS-CoV-2, including COVID-19 in a subject in need thereof, the method comprising administering to the subject a therapeutically effective amount of a nucleic acid according to any one of aspects 10-32.

[0318] A 45^{th} aspect is directed to a method for inducing immunity against a SARS-CoV-2 infection (or a closely related virus such as Severe Acute Respiratory Syndrome (SARS) or Middle East respiratory syndrome coronavirus (MERS-CoV)) and/or related diseases caused by SARS-CoV-2, including COVID-19 in a subject in need thereof, the method comprising administering to the subject a therapeutically effective amount of a plasmid according to aspect 33.

[0319] A 46^{th} aspect is directed to a method for inducing immunity SARS-CoV-2 infection (or a closely related virus such as Severe Acute Respiratory Syndrome (SARS) or Middle East respiratory syndrome coronavirus (MERS-CoV)) and/or related diseases caused by SARS-CoV-2, including COVID-19 in a subject in need thereof, the method comprising administering to the subject a therapeutically effective amount of a vector according to aspect 34.

[0320] A 47^{th} aspect is directed to a method for inducing immunity against SARS-CoV-2 infection (or a closely related virus such as Severe Acute Respiratory Syndrome (SARS) or Middle East respiratory syndrome coronavirus (MERS-CoV)) and/or related diseases caused by SARS-CoV-2, including COVID-19 in a subject in need thereof, the method comprising administering to the subject a therapeutically effective amount of a pharmaceutical composition according to any one of aspects 35-38.

[0321] A 48^{th} aspect is directed to a method for inducing immunity against SARS-CoV-2 infection (or a closely related virus such as Severe Acute Respiratory Syndrome (SARS) or Middle East respiratory syndrome coronavirus (MERS-CoV)) and/or related diseases caused by SARS-CoV-2, including COVID-19 in a subject in need thereof, the method comprising administering to the subject a therapeutically effective amount of a vaccine composition according to any one of aspects 39-42.

[0322] A 49^{th} aspect is directed to a method according to any one of aspects 43-48, wherein the step of administration additionally includes administration of an SARS-CoV-2 virus, wherein the virus is a live attenuated virus or inactivated virus.

[0323] A 50^{th} aspect is directed to a method for inducing an immune response against SARS-CoV-2 infection (or a closely related virus such as Severe Acute Respiratory Syndrome (SARS) or Middle East respiratory syndrome coronavirus (MERS-CoV)) and/or related diseases caused by SARS-CoV-2, including COVID-19 in a subject in need thereof, the method comprising administering to the subject a therapeutically effective amount of one or more of a polypeptide according to any one of aspects 1-9 or 10-32.

[0324] A 51st aspect is directed to a method for inducing an immune response against against SARS-CoV-2 infection (or a closely related virus such as Severe Acute Respiratory Syndrome (SARS) or Middle East respiratory syndrome coronavirus (MERS-CoV)) and/or related diseases caused by SARS-CoV-2, including COVID-19 in a subject in need thereof, the method comprising administering to the subject a therapeutically effective amount of a nucleic acid according to any one of aspects 10-32.

[0325] A 52^{nd} aspect is directed to a method for inducing an immune response against against SARS-CoV-2 infection (or a closely related virus such as Severe Acute Respiratory Syndrome (SARS) or Middle East respiratory syndrome coronavirus (MERS-CoV)) and/or related diseases caused by SARS-CoV-2, including COVID-19 in a subject in need thereof, the method comprising administering to the subject a therapeutically effective amount of a plasmid according to aspect 33.

[0326] A 53^{rd} aspect is directed to a method for inducing an immune response against against SARS-CoV-2 infection (or a closely related virus such as Severe Acute Respiratory Syndrome (SARS) or Middle East respiratory syndrome coronavirus (MERS-CoV)) and/or related diseases caused by SARS-CoV-2, including COVID-19 in a subject in need thereof, the method comprising administering to the subject a therapeutically effective amount of a vector according to aspect 34.

[0327] A 54^{th} aspect is directed to a method for inducing an immune response against SARS-CoV-2 infection (or a closely related virus such as Severe Acute Respiratory Syndrome (SARS) or Middle East respiratory syndrome coronavirus (MERS-CoV)) and/or related diseases caused by SARS-CoV-2, including COVID-19 in a subject in need thereof, the method comprising administering to the subject a therapeutically effective amount of a pharmaceutical composition according to any one of aspects 35-38.

[0328] A 55^{th} aspect is directed to a method for inducing an immune response against against SARS-CoV-2 infection (or a closely related virus such as Severe Acute Respiratory Syndrome (SARS) or Middle East respiratory syndrome coronavirus (MERS-CoV)) and/or related diseases caused by SARS-CoV-2, including COVID-19, in a subject in need thereof, the method comprising administering to the subject a therapeutically effective amount of a vaccine composition according to any one of aspects 39-42.

[0329] A 56^{th} aspect is directed to a method according to any one of aspects 50-55, wherein the step of administration additionally includes administration of a SARS-CoV-2 virus, wherein the virus is a live attenuated virus or inactivated virus. A 57^{th} aspect is directed to a chimeric or fusion polypeptide comprising a polypeptide of any one of aspects 1-9 or 10-32, wherein said polypeptide is joined, linked, or inserted into a heterologous polypeptide.

[0330] A 58^{th} aspect is directed to a method for measuring a CMI response against SARS-CoV-2 or a related coronavirus in a subject, said method comprising; collecting a whole blood sample from said subject wherein said whole blood sample comprises cells of the immune system which are capable of producing immune effector molecules following stimulation by an antigen, incubating a mixture comprising the whole blood sample, at least one polypeptide according to any one of aspects 1-9 or 10-32, optionally an amount of an isolated simple sugar effective to enhance the stimulation by the antigen, and optionally heparin, and measuring the presence of, or elevation in, the level of an immune effector molecule wherein the presence or level of said immune effector molecule is indicative of the capacity of said subject to mount a cell-mediated immune response.

[0331] A 59^{th} aspect is directed to a method of aspect 58 wherein the subject is a human.

[0332] A 60^{th} aspect is directed to a method of aspect 58 wherein the whole blood is collected in a tube comprising the at least one polypeptide.

[0333] A 61^{st} aspect is directed to a method of aspect 58 wherein the whole blood is collected in a tube comprising heparin.

[0334] A 62^{nd} aspect is directed to a method of aspect 60 wherein the tube comprises heparin.

[0335] A 63^{rd} aspect is directed to a method of aspect 58 wherein the whole blood sample is incubated with the at least one polypeptide for from about 5 to about 50 hours.

[0336] A 64^{th} aspect is directed to a method of aspect 58 wherein the immune effector molecule is a cytokine.

[0337] A 65^{th} aspect is directed to a method of aspect 64 wherein the cytokine is IFN-γ.

[0338] A 66^{th} aspect is directed to a method of aspect 64 wherein the cytokine is GM-CSF.

[0339] A 67^{th} aspect is directed to a method of aspect 64 wherein the cytokine is an interleukin.

[0340] A 68^{th} aspect is directed to a method of aspect 64 wherein the cytokine is a TNF-α.

[0341] A 69^{th} aspect is directed to a method of either aspect 58 or 59 wherein the subject is infected by SARS-CoV-2 or a related coronavirus.

[0342] A 70^{th} aspect is directed to a method of aspect 58 wherein the immune cells are selected from NK cells, T-cells, B-cells, dendritic cells, macrophages or monocytes.

[0343] A 71st aspect is directed to a method of aspect 60 wherein the immune cells are T-cells.

[0344] A 72^{nd} aspect is directed to a method of aspect 58 wherein the simple sugar is dextrose.

[0345] A 73^{rd} aspect is directed to a method of aspect 58 wherein the immune effectors are detected with antibodies specific for same.

[0346] A 74^{th} aspect is directed to a method of aspect 73 wherein the immune effectors are detected using ELISA.

[0347] A 75^{th} aspect is directed to a method of aspect 73 wherein the immune effectors are detected using ELISpot.

[0348] A 76^{th} aspect is directed to a assay for identifying SARS-CoV-2 or a related coronavirus-specific immediate effector T cells in a subject, comprising: (a) providing a sample from said subject containing T cells; (b) exposing said T cells to an immunogenic amount of at least one polypeptide according to any one of aspects 1-9 or 10-32; and (c) prior to the generation of new immediate effector T cells in the sample, determining whether said T cells are activated by said polypeptide by measuring secretion of a cytokine from said T cells; wherein activation of said T cells identifies the presence of SARS-CoV-2 or a related coronavirus -specific immediate effector T cells that were present in the original sample, in said subject.

[0349] A 77^{th} aspect is directed to a method of aspect 76, wherein said T cells are peripheral blood mononuclear cells.

[0350] A 78^{th} aspect is directed to a method of aspect 76, wherein the activation of said T cells is determined by measuring secretion of interferon-γ from said T cells.

[0351] A 79^{th} aspect is directed to a method of aspect 74, wherein said subject is known to be suffering, or to have suffered from, infection with SARS-CoV-2 or a related coronavirus.

[0352] A 80^{th} aspect is directed to a method of aspect 79, wherein said infection is monitored.

[0353] A 81^{st} aspect is directed to an assay for identifying SARS-CoV-2 or a related coronavirus-specific immediate effector T cells in a subject, comprising: (a) providing a sample from said subject containing T cells; (b) exposing said T cells to an immunogenic amount of at least one polypeptide according to any one of aspects 1-9 or 10-32; (c) incubating said T cells for a period of time which is not sufficient to effect differentiation of quiescent T cells to immediate effector T cells; and (d) determining whether said T cells are activated by said polypeptide by measuring secretion of a cytokine from said T cells, wherein activation of said T cells identifies the presence of SARS-CoV-2 or a related coronavirus-specific immediate effector T cells in said subject.

[0354] A 82^{nd} aspect is directed to a method of either aspect 80 or 81, wherein said T cells are exposed to said polypeptide at around 37° C.

[0355] A 83^{th} aspect is directed to a method of aspect 81, wherein said incubation time is from 4 hours to 24 hours.

[0356] A 84^{th} aspect is directed to a method of aspect 81, wherein said incubation time is from 6 hours to 16 hours.

[0357] A 85^{th} aspect is directed to a method of detecting an anti-SARS-CoV-2 or a related coronavirus CD8+ and/or CD4+ T cell response comprising contacting a population of CD8+ and/or CD4+ T cells of a human individual with one or more polypeptides according to any one of aspects 1-9 or 10-32, wherein one or more polypeptides may be substituted by an analogue which binds a T cell receptor that recognizes the peptide, and determining whether CD8+ and/or CD4+ T cells of the CD8+ and/or CD4+ T cell population recognize the peptide(s).

[0358] A 86^{th} aspect is directed to a method according to aspect 85 wherein a peptide panel is employed, wherein said panel includes said one or more polypeptide or said analogues thereof.

[0359] A 87th aspect is directed to a method according to aspect 85 wherein any analogue which is used is (i) at least 70% homologous, preferably at least 80% homologous, more preferably at least 90% homologous, to the entire polypeptide, and/or (ii) has one or more deletions at the N-terminus and/or C-terminus in comparison to the polypeptide, and/or (iii) has one or more conservative substitutions compared to the polypeptide.

[0360] A 88^{th} aspect is directed to a method according to aspect 85 in which the recognition of the polypeptide(s) by the CD8+ and/or CD4+ T cells is determined by measuring secretion of a cytokine from the CD8+ and/or CD4+ T cells.

[0361] 89^{th} aspect is directed to a method according to aspect 88 in which IFN-γ secretion from the T cells is measured.

[0362] A 90^{th} aspect is directed to a method according to aspect 89 in which IFN-γ secretion from the CD8+ and/or CD4+ T cells is determined by allowing secreted IFN-γ to bind an immobilized antibody specific to the cytokine and then determining the presence of antibody/cytokine complex.

[0363] A 91^{st} aspect is directed to a method according to aspect 85 in which the CD8+ and/or CD4+ T cells are freshly isolated ex vivo cells from peripheral blood.

[0364] A 92^{nd} aspect is directed to a method according to aspect 85 in which CD8+ and/or CD4+ T cells are pre-cultured in vitro with the peptide(s).

[0365] A 93^{rd} aspect is directed to a method according to aspect 85 wherein the population of CD8+ and/or CD4+ T cells is from an individual to whom an anti-SARS-CoV-2 or related coronavirus vaccine has been administered.

[0366] A 94^{th} aspect is directed to a method according to aspect 85 which is carried out in vitro.

[0367] A 95th aspect is directed to a method of diagnosing infection in a human host by, or exposure of a human host to, a SARS-CoV-2 or a related coronavirus, which method comprises the steps of: (i) contacting a population of T cells from the host with one or more polypeptides according to any one of aspects 1-9 or 10-32; and (ii) determining in vitro whether the T cells of said T cell population show a recognition response to said polypeptide.

[0368] A 96^{th} aspect is directed to a method of aspect 95, wherein the T cells are freshly isolated.

[0369] A 97^{th} aspect is directed to a method of aspect 95, wherein the T cells are isolated from blood.

[0370] A 98^{th} aspect is directed to a method of aspect 95, wherein the T cell population comprises CD4+ and/or CD8+ T cells.

[0371] A 99^{th} aspect is directed to a method of aspect 95, wherein the host is a healthy human host who has been exposed to SARS-CoV-2 or a related coronavirus.

[0372] A 100^{th} aspect is directed to a kit comprising one or more polypeptides according to any one of aspects 1-9 or 10-32, wherein said one or more polypeptides may be substituted by an analogue which binds a T cell receptor which recognizes the polypeptide, and optionally a means to detect recognition of the polypeptide(s) by CD8+ and/or CD4+ T cells.

[0373] A 101st aspect is directed to a kit according to aspect 100 which includes an antibody to IFN-γ.

[0374] A 102^{nd} aspect is directed to a kit according to aspect 100 wherein said antibody is immobilized on a solid support and which optionally also includes a means to detect any antibody/IFN-γ complex.

[0375] A 103^{rd} aspect is directed to a kit according to aspect 100 which includes the means to detect recognition of the peptide(s) by CD8+ and/or CD4+ T cells.

[0376] A 104^{th} aspect is directed to a kit according to aspect 102 which includes the means to detect any antibody/IFN-γ complex.

[0377] A 105^{th} aspect is directed to a method of preventing, treating, or ameliorating a disease by SARS-CoV-2 infection, such as COVID-19 in a subject in need thereof, the method comprising administering to the subject a therapeutically effective amount of one or more of a polypeptide according to any one of aspects 1-9 or 10-32.

[0378] A 106^{th} aspect is directed to a method of preventing, treating, or ameliorating a disease by SARS-CoV-2 infection, such as COVID-19 in a subject in need thereof, the method comprising administering to the subject a therapeutically effective amount of a nucleic acid according to any one of aspects 10-32.

[0379] A 107^{th} aspect is directed to a method of preventing, treating, or ameliorating a disease by SARS-CoV-2 infection, such as COVID-19 in a subject in need thereof, the method comprising administering to the subject a therapeutically effective amount of a plasmid according to aspect 33.

[0380] A 105^{th} aspect is directed to a method of preventing, treating, or ameliorating a disease by SARS-CoV-2 infection, such as COVID-19 in a subject in need thereof, the method comprising administering to the subject a therapeutically effective amount of a vector according to aspect 34.

[0381] A 106^{th} aspect is directed to a method of preventing, treating, or ameliorating a disease by SARS-CoV-2 infection, such as COVID-19 in a subject in need thereof, the method comprising administering to the subject a therapeutically effective amount of a pharmaceutical composition according to any one of aspects 35-38.

[0382] A 107^{th} aspect is directed to a method of preventing, treating, or ameliorating a disease by SARS-CoV-2 infection, such as COVID-19 in a subject in need thereof, the method comprising administering to the subject a therapeutically effective amount of a vaccine composition according to any one of aspects 39-42.

[0383] A 108^{th} aspect is directed to a method according to any one of aspects 50-55, wherein the step of administration additionally includes administration of a SARS-CoV-2 virus, wherein the virus is a live attenuated virus or inactivated virus.

[0384] A 109^{th} aspect is directed to a polypeptide according to any one of aspects 1-9 or 10-32, wherein said polypeptide has one or more conservative substitutions compared to the polypeptide.

[0385] A 110^{th} aspect is directed to a polypeptide according to aspect 109, wherein said polypeptide retains MHC binding propensity and TCR specificity, and/or retains anti-SARS-CoV-2 activity.

[0386] Further aspects and advantages of the instant disclosure are provided in the following section, which should be considered as illustrative only.

### EXAMPLES

[0387] The examples that follow are not to be construed as limiting the scope of the invention in any manner. In light of the present disclosure, numerous embodiments within the scope of the claims will be apparent to those of ordinary skill in the art.

### Example 1: In-Silico Identification of Potential Epitopes for HLA

[0388] T-cells specifically recognize epitopes presented by cells in the context of MHC (Major Histocompatibility Complex) Class I and II molecules. These T-cell epitopes can be represented as linear sequences comprising 7 to 30 contiguous amino acids that fit into the MHC Class I or II binding groove. A number of computer algorithms have been developed and used for detecting Class I and II epitopes within protein molecules of various origins (De Groot A S et al., (1997), AIDS Res Hum Retroviruses,13(7):539-41; Schafer J R et al., (1998), Vaccine,16(19):1880-4; De Groot A S et al., (2001), Vaccine, 19(31):4385-95; De Groot A S et al., (2003), Vaccine, 21(27-30):4486-504). These “in silico” predictions of T-cell epitopes have been successfully applied to the design of vaccines and the de-immunization of therapeutic proteins, i.e. antibody-based drugs, Fc fusion proteins, anticoagulants, blood factors, bone morphogenetic proteins, engineered protein scaffolds, enzymes, growth factors, hormones, interferons, interleukins, and thrombolytics (Dimitrov D S, (2012), Methods Mol Biol, 899:1-26).

[0389] The Conservatrix system (EpiVax, Providence, R.I.) is an algorithm useful for identifying 9-mer polypeptide sequences from a larger set of data. The Conservatrix system parses input sequences into 9-mer sequences that are conserved amongst multiple inputted whole sequences, such as multiple strains of the same pathogen, for even the most mutable of potential vaccine targets. These 9-mer sequences may be searched for identically matched 9-mer sequences across data sets.

[0390] The EpiMatrix™ system (EpiVax, Providence, R.I.) is a set of predictive algorithms encoded into computer programs useful for predicting class I and class II HLA ligands and T cell epitopes. The EpiMatrix™ system uses matrices in order to model the interaction between specific amino acids and binding positions within the HLA molecule. In order to identify putative epitopes resident within any given input protein, the EpiMatrix™ System first parses the input protein into a set of overlapping n-mer frames (n=length of amino acids of epitope peptide being screen; e.g., n=9 or n=10) where each frame overlaps the last by n-1 amino acids. Each frame is then scored for predicted affinity to one or more common alleles of the HLA molecules. Briefly, for any given n-mer peptide specific amino acid codes (one for each of 20 naturally occurring amino acids) and relative binding positions (1 to n) are used to select coefficients from the predictive matrix. Individual coefficients are derived using a proprietary method similar to, but not identical to, the pocket profile method first developed by Sturniolo (Sturniolo T et al., 1999, Nat Biotechnol, 17(6):555-61). Individual coefficients are then summed to produce a raw score. EpiMatrix™ raw scores are then normalized with respect to a score distribution derived from a very large set of randomly generated peptide sequences. The resulting “Z” scores are normally distributed and directly comparable across alleles. It was determined that any peptide scoring above 1.64 on the EpiMatrix™ “Z” scale (approximately the top 5% of any given peptide set) has a significant chance of binding to the MHC molecule for which it was predicted. Peptides scoring above 2.32 on the scale (the top 1%) are extremely likely to bind. FIGS. 2-4 are EpiMatrix Cluster detail reports for identified MHC class II clusters of the envelope (SEQ ID NO: 1) of SARS-CoV-2. FIGS. 6-15 are EpiMatrix Cluster detail reports for identified MHC class II clusters of the membrane (SEQ ID NO: 2) of SARS-CoV-2. FIGS. 17-55 are EpiMatrix Cluster detail reports for identified MHC class II clusters of the spike (SEQ ID NO: 3) of SARS-CoV-2. FIG. 59 is an EpiMatrix staircase report for identified MHC class I clusters of the envelope (SEQ ID NO: 1) of SARS-CoV-2. FIG. 60 is an EpiMatrix staircase report for identified MHC class I clusters of the membrane (SEQ ID NO: 2) of SARS-CoV-2. FIG. 61 is an EpiMatrix staircase report for identified MHC class I clusters of the spike (SEQ ID NO: 3) of SARS-CoV-2.

[0391] Peptides containing clusters of putative T cell epitopes are more likely to test positive in validating in vitro and in vivo assays. In aspects, the results of the initial EpiMatrix™ analysis is further screened for the presence of putative T cell epitope “clusters” using a second proprietary algorithm known as Clustimer™ algorithm. The Clustimer™ algorithm identifies sub-regions contained within any given amino acid sequence that contains a statistically unusually high number of putative T cell epitopes. Typical T-cell epitope “clusters” range from about 9 to roughly 30 amino acids in length and, considering their affinity to multiple alleles and across multiple 9-mer frames, can contain anywhere from about 4 to about 40 putative T cell epitopes. FIG. 1 is an overview of MHC class II cluster selection from the envelope (SEQ ID NO: 1) of SARS-CoV-2. FIG. 5 is an overview of MHC class II cluster selection from the membrane (SEQ ID NO: 2) of SARS-CoV-2. FIG. 16 is an overview of MHC class II cluster selection from the spike (SEQ ID NO: 3) of SARS-CoV-2. Each epitope cluster identified an aggregate EpiMatrix™ score is calculated by summing the scores of the putative T cell epitopes and subtracting a correcting factor based on the length of the candidate epitope cluster and the expected score of a randomly generated cluster of the same length. EpiMatrix™ cluster scores in excess of +10 are considered significant. In aspects, the T-cell epitopes of the instant disclosure contain several putative T-cell epitopes forming a pattern known as a T-cell epitope cluster.

[0392] The JanusMatrix system (EpiVax, Providence, Rhode Island) useful for screening peptide sequences for cross-conservation with a host proteome. JanusMatrix is an algorithm that predicts the potential for cross-reactivity between peptide clusters and the host genome or proteome, based on conservation of TCR-facing residues in their putative MHC ligands. The JanusMatrix algorithm first considers all the predicted epitopes contained within a given protein sequence and divides each predicted epitope into its constituent agretope and epitope. Each sequence is then screened against a database of host proteins. Peptides with a compatible MHC-facing agretope (i.e., the agretopes of both the input peptide and its host counterparty are predicted to bind the same MHC allele) and exactly the same TCR-facing epitope are returned. The JanusMatrix

[0393] Homology Score suggests a bias towards immune tolerance. In the case of a therapeutic protein, cross-conservation between autologous human epitopes and epitopes in the therapeutic may increase the likelihood that such a candidate will be tolerated by the human immune system. In the case of a vaccine, cross-conservation between human epitopes and the antigenic epitopes may indicate that such a candidate utilizes immune camouflage, thereby evading the immune response and making for an ineffective vaccine. When the host is, for example, a human, the peptide clusters are screened against human genomes and proteomes, based on conservation of TCR-facing residues in their putative HLA ligands. The peptides are then scored using the JanusMatrix Homology Score. In aspects, peptides with a JanusMatrix Homology Score below 2.5 or below 3.0 indicate low tolerogenicity potential and may be useful for vaccines. In aspects, peptides with a JanusMatrix Homology Score above 3.0 indicate high tolerogenicity potential and may not be useful for vaccines, and in aspects may be excluded from the T cell epitope compositions of the present disclosure. FIG. 56 is the JanusMatrix reports for identified MHC class II clusters of the envelope (SEQ ID NO: 1) of SARS-CoV-2. FIG. 57 is the JanusMatrix reports for identified MHC class II clusters of the membrane (SEQ ID NO: 2) of SARS-CoV-2. FIG. 58 is the JanusMatrix reports for identified MHC class II clusters of the spike (SEQ ID NO: 3) of SARS-CoV-2.

[0394] In aspects, the VaccineCAD system is useful for arranging potential epitopic vaccine candidates into a string to avoid creation of novel epitopes upon joining of the vaccine candidate sequences. Specifically, VaccineCAD designs potential vaccine candidates into a string-of-beads vaccine while minimizing any deleterious junctional epitopes that may appear in the joining process. VaccineCAD may use EpiMatrix to predict junctional epitopes. Particularly concatemeric peptides of interest developed using VaccineCad are those of SEQ ID NOS: 1677-1692, 2593-2604, 2639-2646, and 2719-2734, and in aspects SEQ ID NOS: 1677-1684. Similarly, particular nucleic acids of interest (including RNA, mRNA, DNA, etc.) are those encoding a peptide or polypeptide comprising, consisting of, or consisting essentially of one or more peptides or polypeptides having an amino acid sequence off SEQ ID NOS: 1677-1692, 2593-2604, 2639-2646, and 2719-2734.

### Example 2: Concatemeric Peptides

[0395] 2.1—A total of 22-34 class I and class II peptides were selected for inclusion in a first set of the instantly-disclosed vaccine constructs, following immunoinformatic predictions. Selection was based on at least, high binding likelihood to HLA class I and class II alleles, and low tolerogenicity potential. Putative class I epitopes were in the top 1% of predicted ligands, and had Janus Matrix Homology Scores below 2. Putative class II epitopes, were predicted to bind to four or more HLA alleles, and had JanusMatrix Homology Scores below 2. The selected epitope clusters for HLA Class I and Class II used to produce the concatemeric peptides of SEQ ID NOS: 1677-1681, 2593-2604, 2641-2646, and 2719-2722 (and associated nucleic acid constructs encoding such) include the below sequences in TABLE 2. The selected epitope clusters for HLA

[0396] Class I and Class II used to produce the concatemeric peptides of SEQ ID NOS: 1682-1684 (and associated nucleic acid constructs encoding such) include the below sequences in TABLE 3.

TABLE 2
>ENVELOPE: 0001 Surface
MYSFVSEETGTLIVN (SEQ ID NO: 1055)
>ENVELOPE: 0060 Intracellular
SRVKNLNSSRVPD (SEQ ID NO: 1058)
>MEMBRANE: 0013 Surface
LKKLLEQWNLVIGFLFLTW (SEQ ID NO: 1061)
>MEMBRANE: 0032 Transmembrane
ICLLQFAYANRNRFLYI (SEQ ID NO: 1118)
>MEMBRANE: 0062 Transmembrane
LACFVLAAVYRINWI (SEQ ID NO: 1064)
>MEMBRANE: 0093 Transmembrane
LSYFIASFRLFARTRSMWSFNPETNILLNV (SEQ ID 2638)
>MEMBRANE: 0146 Intracellular
RGHLRIAGHHLGRCD (SEQ ID NO: 1119)
>MEMBRANE: 0165 Intracellular
PKEITVATSRTLSYY (SEQ ID NO: 1070)
>MEMBRANE: 0201 Intracellular
IGNYKLNTDHSSSSDNI (SEQ ID NO: 1072)
>SPIKE: 0025 Extracellular
PPAYTNSFTRGVYY (SEQ ID NO: 1074)
>SPIKE: 0052 Extracellular
QDLFLPFFSNVTWFHAIHVSGTNGT (SEQ ID NO: 2617)
>SPIKE: 0087 Extracellular
NDGVYFASTEKSNIIR (SEQ ID NO: 1120)
>SPIKE: 0114 Extracellular
TQSLLIVNNATNVVIKV (SEQ ID NO: 1975)
>SPIKE: 0140 Extracellular
FLGVYYHKNNKSWMESEFRVYSSANNCTFEYV (SEQ ID
NO: 2621)
>SPIKE: 0198 Extracellular
DGYFKIYSKHTPINL (SEQ ID NO: 1082)
>SPIKE: 0239 Extracellular
QTLLALHRSYLTPGDSS (SEQ ID NO: 1085)
>SPIKE: 0272 Extracellular
PRTFLLKYNENGTITDA (SEQ ID NO: 1086)
>SPIKE: 0315 Extracellular
TSNFRVQPTESIVRF (SEQ ID NO: 1086)
>SPIKE: 0338 Extracellular
FGEVFNATRFASVYAWNRKRISNCVADYSVLYNSASFSTFK
(SEQ ID NO: 2637)
>SPIKE: 0446 Extracellular
GGNYNYLYRLFRKSNLKPFERDI (SEQ ID NO: 1091)
>SPIKE: 0483 Extracellular
VEGFNCYFPLQSYGFQPTNGVGYQPY (SEQ ID NO: 2620)
>SPIKE: 0512 Extracellular
VLSFELLHAPATVCG (SEQ ID NO: 1095)
>SPIKE: 0536 Extracellular
NKCVNFNFNGLTGTGVLTE (SEQ ID NO: 2616)
>SPIKE: 0715 Extracellular
PTNFTISVTTEILPV (SEQ ID NO: 1098)
>SPIKE: 0753 Extracellular
LLQYGSFCTQLNRALTGIAVEQ (SEQ ID NO: 1099)
>SPIKE: 0797 Extracellular
FGGFNFSQILPDPSKPSKRS (SEQ ID NO: 1100)
>SPIKE: 0866 Extracellular
TDEMIAQYTSALLA (SEQ ID NO: 1104)
>SPIKE: 0895 Extracellular
QIPFAMQMAYRFNGIGV (SEQ ID NO: 1123_
>SPIKE: 0920 Extracellular
QKLIANQFNSAIGKIQDSL (SEQ ID NO: 2609)
>SPIKE: 0998 Extracellular
TGRLQSLQTYVTQQL (SEQ ID NO: 1110)
>SPIKE: 1044 Extracellular
GKGYHLMSFPQSAPH (SEQ ID NO: 1113)
>SPIKE: 1127 Extracellular
DVVIGIVNNTVYDPL (SEQ ID NO: 1114)
>SPIKE: 1152 Extracellular
LDKYFKNHTSPDVDL (SEQ ID NO: 1115)
>SPIKE: 1169 Extracellular
ISGINASVVNIQKEI (SEQ ID NO: 1116)

TABLE 3
>PENTAMER1: 0140
FLGVYYHKNNKSWMESE (SEQ ID NO: 1080)
>PENTAMER1: 0483
VEGFNCYFPLQSYGFQPT (SEQ ID NO: 1092)
>PENTAMER1: 1152
LDKYFKNHTSPDVDL (SEQ ID NO: 1115)
>PENTAMER1: 0536
NKCVNFNFNGLTGT (SEQ ID NO: 1122)
>PENTAMER1: 0315
TSNFRVQPTESIVRF (SEQ ID NO: 1089)
>PENTAMER2: 0154
ESEFRVYSSANNCTFEYV (SEQ ID NO: 1081)
>PENTAMER2: 0797
FGGFNFSQILPDPSKPSKRS (SEQ ID NO: 1100)
>PENTAMER2: 0998
TGRLQSLQTYVTQQL (SEQ ID NO: 1110)
>PENTAMER2: 0492
LQSYGFQPTNGVGYQPY (SEQ ID NO: 1093)
>PENTAMER2: 0025
PPAYTNSFTRGVYY (SEQ ID NO: 3)
>PENTAMER3: 0446
GGNYNYLYRLFRKSNLKPFERDI (SEQ ID NO: 1091)
>PENTAMER3: 0239
QTLLALHRSYLTPGDSS (SEQ ID NO: 1085)
>PENTAMER3: 0140
FLGVYYHKNNKSWMESE (SEQ ID NO: 1080)
>PENTAMER3: 0272
PRTFLLKYNENGTITDA (SEQ ID NO: 1086)
>PENTAMER3: 0154
ESEFRVYSSANNCTFEYV (SEQ ID NO: 1081)
>PENTAMER1: 0140
FLGVYYHKNNKSWMESE (SEQ ID NO: 1080)
>PENTAMER1: 0483
VEGFNCYFPLQSYGFQPT (SEQ ID NO: 1092)
>PENTAMER1: 1152
LDKYFKNHTSPDVDL (SEQ ID NO: 1115)
>PENTAMER1: 0536
NKCVNFNFNGLTGT (SEQ ID NO: 1122)
>PENTAMER1: 0315
TSNFRVQPTESIVRF (SEQ ID NO: 1087)
>PENTAMER2: 0154
ESEFRVYSSANNCTFEYV (SEQ ID NO: 1081)
>PENTAMER2: 0797
FGGFNFSQILPDPSKPSKRS (SEQ ID NO: 1100)
>PENTAMER2: 0998
TGRLQSLQTYVTQQL (SEQ ID NO: 1110)
>PENTAMER2: 0492
LQSYGFQPTNGVGYQPY (SEQ ID NO: 1093)
>PENTAMER2: 0025
PPAYTNSFTRGVYY (SEQ ID NO: 1074)
>PENTAMER3: 0446
GGNYNYLYRLFRKSNLKPFERDI (SEQ ID NO: 1091)
>PENTAMER3: 0239
QTLLALHRSYLTPGDSS (SEQ ID NO: 1085)
>PENTAMER3: 0140
FLGVYYHKNNKSWMESE (SEQ ID NO: 1080)
>PENTAMER3: 0272
PRTFLLKYNENGTITDA (SEQ ID NO: 1086)
>PENTAMER3: 0154
ESEFRVYSSANNCTFEYV (SEQ ID NO 1081)

[0397] Predicted epitope sequences were concatenated to form 22 multi-epitope pseudo-proteins. Vaccine constructs predicted to have no junctional epitopes were designed. VaccineCAD was used to rearrange the peptides to avoid creation of novel epitopes at peptide junctions, and used JanusMatrix to predict junctional epitopes. Where reordering did not sufficiently reduce the potential for junctional immunogenicity, spacers (e.g., Gly-Pro-Gly-Pro-Gly) were introduced. In aspects, a cleavage promoting motif or a binding inhibiting ‘breaker’ sequence could be introduced between peptides to optimize epitope processing. In aspects, T cell epitope cluster flanking residues were extended or removed to further minimize junctional T cell epitope content. These post-VaccineCAD, optimized multi-epitope constructs are represented by sequences SEQ ID NOS: 1677-1684,2593-2604, 2641-2646, and 2719-2722. These constructs are located below in Tables 4-11, Tables 35-40, and Tables 41-44. Additional epitope concatemers containing coronavirus cross-conserved sequences are represented by SEQ ID NOS: 1685-1692 and 2723-2734, and are found in Tables 12-19 and 45-56.

TABLE 4
SEQ ID NO: 1677
TQSLLIVNNATNVVIKVFLGVYYHKNNKSWMESEFRVYSSANNCTFEYVP
KEITVATSRTLSYYGSGSGRGHLRIAGHHLGRCDNKCVNFNFNGLTGTGV
LTELLQYGSFCTQLNRALTGIAVEQLSYFIASFRLFARTRSMWSFNPETN
ILLNVGGNYNYLYRLFRKSNLKPFERDILKKLLEQWNLVIGFLFLTWGSG
SGFGGFNFSQILPDPSKPSKRSVLSFELLHAPATVCGQTLLALHRSYLTP
GDSSICLLQFAYANRNRFLYIVEGFNCYFPLQSYGFQPTNGVGYQPYDVV
IGIVNNTVYDPLQIPFAMQMAYRFNGIGVTGRLQSLQTYVTQQLTDEMIA
QYTSALLANDGVYFASTEKSNIIRPPAYTNSFTRGVYYLDKYFKNHTSPD
VDLPTNFTISVTTEILPVGSGSGTSNFRVQPTESIVRFDGYFKIYSKHTP
INLQDLFLPFFSNVTWFHAIHVSGTNGTSRVKNLNSSRVPDPRTFLLKYN
ENGTITDAISGINASVVNIQKEIFGEVFNATRFASVYAWNRKRISNCVAD
YSVLYNSASFSTFKGKGYHLMSFPQSAPHQKLIANQFNSAIGKIQDSLGS
GSGIGNYKLNTDHSSSSDNIMYSFVSEETGTLIVNLACFVLAAVYRINWI

TABLE 5
SEQ ID NO: 1678
FGGFNFSQILPDPSKPSKRSGGNYNYLYRLFRKSNLKPFERDIFLGVYYH
KNNKSWMESEFRVYSSANNCTFEYVPRTFLLKYNENGTITDASRVKNLNS
SRVPDTQSLLIVNNATNVVIKVGSGSGGKGYHLMSFPQSAPHISGINASV
VNIQKEIGSGSGLKKLLEQWNLVIGFLFLTWQIPFAMQMAYRFNGIGVTG
RLQSLQTYVTQQLGSGSGIGNYKLNTDHSSSSDNIRGHLRIAGHHLGRCD
VLSFELLHAPATVCGLLQYGSFCTQLNRALTGIAVEQLSYFIASFRLFAR
TRSMWSFNPETNILLNVNDGVYFASTEKSNIIRGSGSGQKLIANQFNSAI
GKIQDSLMYSFVSEETGTLIVNFGEVFNATRFASVYAWNRKRISNCVADY
SVLYNSASFSTFKQTLLALHRSYLTPGDSSPPAYTNSFTRGVYYVEGFNC
YFPLQSYGFQPTNGVGYQPYDVVIGIVNNTVYDPLGSGSGLACFVLAAVY
RINWIPKEITVATSRTLSYYPTNFTISVTTEILPVNKCVNFNFNGLTGTG
VLTEDGYFKIYSKHTPINLQDLFLPFFSNVTWFHAIHVSGTNGTTSNFRV
QPTESIVRFTDEMIAQYTSALLALDKYFKNHTSPDVDLICLLQFAYANRN
RFLYI

TABLE 6
SEQ ID NO: 1679
GKGYHLMSFPQSAPHQTLLALHRSYLTPGDSSVLSFELLHAPATVCGQKL
IANQFNSAIGKIQDSLLKKLLEQWNLVIGFLFLTWQIPFAMQMAYRFNGI
GVPKEITVATSRTLSYYPTNFTISVTTEILPVICLLQFAYANRNRFLYIN
DGVYFASTEKSNIIRTDEMIAQYTSALLANKCVNFNFNGLTGTGVLTEDG
YFKIYSKHTPINLQDLFLPFFSNVTWFHAIHVSGTNGTTGRLQSLQTYVT
QQLGSGSGLACFVLAAVYRINWIVEGFNCYFPLQSYGFQPTNGVGYQPYF
LGVYYHKNNKSWMESEFRVYSSANNCTFEYVLDKYFKNHTSPDVDLPPAY
TNSFTRGVYYPRTFLLKYNENGTITDASRVKNLNSSRVPDTQSLLIVNNA
TNVVIKVGGNYNYLYRLFRKSNLKPFERDIMYSFVSEETGTLIVNFGGFN
FSQILPDPSKPSKRSLLQYGSFCTQLNRALTGIAVEQISGINASVVNIQK
EIDVVIGIVNNTVYDPLRGHLRIAGHHLGRCDTSNFRVQPTESIVRFFGE
VFNATRFASVYAWNRKRISNCVADYSVLYNSASFSTFKIGNYKLNTDHSS
SSDNILSYFIASFRLFARTRSMWSFNPETNILLNV

TABLE 35
SEQ ID NO: 2641
GKGYHLMSFPQSAPHQTLLALHRSYLTPGDSSVLSFELLHAPATVCGQKL
IANQFNSAIGKIQDSLLKKLLEQWNLVIGFLFLTWQIPFAMQMAYRFNGI
GVPKEITVATSRTLSYYPTNFTISVTTEILPVICLLQFAYANRNRFLYIN
DGVYFASTEKSNIIRTDEMIAQYTSALLANKCVNFNFNGLTGTGVLTEDG
YFKIYSKHTPINLQDLFLPFFSNVTWFHAIHVSGTNGTTGRLQSLQTYVT
QQLSSDYTIVLPVIGAIVVGLCLMGMGVYKIRLRCQSSGYQRI

TABLE 36
SEQ ID NO: 2642
LACFVLAAVYRINWIVEGFNCYFPLQSYGFQPTNGVGYQPYFLGVYYHKN
NKSWMESEFRVYSSANNCTFEYVLDKYFKNHTSPDVDLPPAYTNSFTRGV
YYPRTFLLKYNENGTITDASRVKNLNSSRVPDTQSLLIVNNATNVVIKVG
GNYNYLYRLFRKSNLKPFERDIMYSFVSEETGTLIVNFGGFNFSQILPDP
SKPSKRSLLQYGSFCTQLNRALTGIAVEQISGINASVVNIQKEIDVVIGI
VNNTVYDPLRGHLRIAGHHLGRCDTSNFRVQPTESIVRFFGEVFNATRFA
SVYAWNRKRISNCVADYSVLYNSASFSTFKIGNYKLNTDHSSSSDNILSY
FIASFRLFARTRSMWSFNPETNILLNV

TABLE 7
SEQ ID NO: 1680
TSNFRVQPTESIVRFGSGSGDVVIGIVNNTVYDPLGSGSGISGINASVVN
IQKEIGSGSGNDGVYFASTEKSNIIRGSGSGGKGYHLMSFPQSAPHGSGS
GRGHLRIAGHHLGRCDGSGSGQDLFLPFFSNVTWFHAIHVSGTNGTGSGS
GLACFVLAAVYRINWIGSGSGVEGFNCYFPLQSYGFQPTNGVGYQPYGSG
SGNKCVNFNFNGLTGTGVLTEGSGSGFGGFNFSQILPDPSKPSKRSGSGS
GTDEMIAQYTSALLAGSGSGGGNYNYLYRLFRKSNLKPFERDIGSGSGQT
LLALHRSYLTPGDSSGSGSGFLGVYYHKNNKSWMESEFRVYSSANNCTFE
YVGSGSGQKLIANQFNSAIGKIQDSLGSGSGPRTFLLKYNENGTITDAGS
GSGVLSFELLHAPATVCGGSGSGTQSLLIVNNATNVVIKVGSGSGIGNYK
LNTDHSSSSDNIGSGSGSRVKNLNSSRVPDGSGSGLLQYGSFCTQLNRAL
TGIAVEQGSGSGMYSFVSEETGTLIVNGSGSGPKEITVATSRTLSYYGSG
SGICLLQFAYANRNRFLYIGSGSGLKKLLEQWNLVIGFLFLTWGSGSGFG
EVFNATRFASVYAWNRKRISNCVADYSVLYNSASFSTFKGSGSGLDKYFK
NHTSPDVDLGSGSGQIPFAMQMAYRFNGIGVGSGSGPPAYTNSFTRGVYY
GSGSGPTNFTISVTTEILPVGSGSGTGRLQSLQTYVTQQLGSGSGLSYFI
ASFRLFARTRSMGSGSGDGYFKIYSKHTPINLWSFNPETNILLNV

TABLE 37
SEQ ID NO: 2643
TSNFRVQPTESIVRFGSGSGDVVIGIVNNTVYDPLGSGSGISGINASVVN
IQKEIGSGSGNDGVYFASTEKSNIIRGSGSGGKGYHLMSFPQSAPHGSGS
GRGHLRIAGHHLGRCDGSGSGQDLFLPFFSNVTWFHAIHVSGTNGTGSGS
GLACFVLAAVYRINWIGSGSGVEGFNCYFPLQSYGFQPTNGVGYQPYGSG
SGNKCVNFNFNGLTGTGVLTEGSGSGFGGFNFSQILPDPSKPSKRSGSGS
FGTDEMIAQYTSALLAGSGSGGGNYNYLYRLRKSNLKPFERDIGSGSGQT
LLALHRSYLTPGDSSGSGSGFLGVYYHKNNKSWMESEFRVYSSANNCTFE
YVGSGSGQKLIANQFNSAIGKIQDSL

TABLE 38
SEQ ID NO: 2644
PRTFLLKYNENGTITDAGSGSGVLSFELLHAPATVCGGSGSGTQSLLIVN
NATNVVIKVGSGSGIGNYKLNTDHSSSSDNIGSGSGSRVKNLNSSRVPDG
SGSGLLQYGSFCTQLNRALTGIAVEQGSGSGMYSFVSEETGTLIVNGSGS
GPKEITVATSRTLSYYGSGSGICLLQFAYANRNRFLYIGSGSGLKKLLEQ
WNLVIGFLFLTWGSGSGFGEVFNATRFASVYAWNRKRISNCVADYSVLYN
SASFSTFKGSGSGLDKYFKNHTSPDVDLGSGSGQIPFAMQMAYRFNGIGV
GSGSGPPAYTNSFTRGVYYGSGSGDGYFKIYSKHTPINLGSGSGPTNFTI
SVTTEILPVGSGSGTGRLQSLQTYVTQQLGSGSGLSYFIASFRLFARTRS
MWSFNPETNILLNV

TABLE 8
SEQ ID NO: 1681
RGHLRIAGHHLGRCDGSGSGSGSLKKLLEQWNLVIGFLFLTWGSGSGSGS
TQSLLIVNNATNVVIKVGSGSGSGSDVVIGIVNNTVYDPLGSGSGSGSIG
NYKLNTDHSSSSDNIGSGSGSGSTGRLQSLQTYVTQQLGSGSGSGSDGYF
KIYSKHTPINLGSGSGSGSPTNFTISVTTEILPVGSGSGSGSQIPFAMQM
AYRFNGIGVGSGSGSGSSRVKNLNSSRVPDGSGSGSGSTSNFRVQPTESI
VRFGSGSGSGSISGINASVVNIQKEIGSGSGSGSTDEMIAQYTSALLAGS
GSGSGSFGGFNFSQILPDPSKPSKRSGSGSGSGSLACFVLAAVYRINWIG
SGSGSGSQDLFLPFFSNVTWFHAIHVSGTNGTGSGSGSGSNDGVYFASTE
KSNIIRGSGSGSGSNKCVNFNFNGLTGTGVLTEGSGSGSGSGGNYNYLYR
LFRKSNLKPFERDIGSGSGSGSPPAYTNSFTRGVYYGSGSGSGSQTLLAL
HRSYLTPGDSSGSGSGSGSVLSFELLHAPATVCGGSGSGSGSFLGVYYHK
NNKSWMESEFRVYSSANNCTFEYVGSGSGSGSQKLIANQFNSAIGKIQDS
LGSGSGSGSLLQYGSFCTQLNRALTGIAVEQGSGSGSGSPRTFLLKYNEN
GTITDAGSGSGSGSVEGFNCYFPLQSYGFQPTNGVGYQPYGSGSGSGSGK
GYHLMSFPQSAPHGSGSGSGSLSYFIASFRLFARTRSMWSFNPETNILLN
VGSGSGSGSLDKYFKNHTSPDVDLGSGSGSGSMYSFVSEETGTLIVNGSG
SGSGSFGEVFNATRFASVYAWNRKRISNCVADYSVLYNSASFSTFKGSGS
GSGSPKEITVATSRTLSYYGSGSGSGSICLLQFAYANRNRFLYI

TABLE 39
SEQ ID NO: 2645
RGHLRIAGHHLGRCDGSGSGSGSLKKLLEQWNLVIGFLFLTWGSGSGSGS
TQSLLIVNNATNVVIKVGSGSGSGSDVVIGIVNNTVYDPLGSGSGSGSIG
NYKLNTDHSSSSDNIGSGSGSGSTGRLQSLQTYVTQQLGSGSGSGSDGYF
KIYSKHTPINLGSGSGSGSPTNFTISVTTEILPVGSGSGSGSQIPFAMQM
AYRFNGIGVGSGSGSGSSRVKNLNSSRVPDGSGSGSGSTSNFRVQPTESI
VRFGSGSGSGSISGINASVVNIQKEIGSGSGSGSTDEMIAQYTSALLAGS
GSGSGSFGGFNFSQILPDPSKPSKRSGSGSGSGSLACFVLAAVYRINWIG
SGSGSGSQDLFLPFFSNVTWFHAIHVSGTNGT

TABLE 40
SEQ ID NO: 2646
NDGVYFASTEKSNIIRGSGSGSGSNKCVNFNFNGLTGTGVLTEGSGSGSG
SGGNYNYLYRLFRKSNLKPFERDIGSGSGSGSPPAYTNSFTRGVYYGSGS
GSGSQTLLALHRSYLTPGDSSGSGSGSGSVLSFELLHAPATVCGGSGSGS
GSFLGVYYHKNNKSWMESEFRVYSSANNCTFEYVGSGSGSGSQKLIANQF
NSAIGKIQDSLGSGSGSGSLLQYGSFCTQLNRALTGIAVEQGSGSGSGSP
RTFLLKYNENGTITDAGSGSGSGSVEGFNCYFPLQSYGFQPTNGVGYQPY
GSGSGSGSGKGYHLMSFPQSAPHGSGSGSGSLSYFIASFRLFARTRSMWS
FNPETNILLNVGSGSGSGSLDKYFKNHTSPDVDLGSGSGSGSMYSFVSEE
TGTLIVNGSGSGSGSFGEVFNATRFASVYAWNRKRISNCVADYSVLYNSA
SFSTFKGSGSGSGSPKEITVATSRTLSYYGSGSGSGSICLLQFAYANRNR
FLYI

TABLE 9
SEQ ID NO: 1682

FLGVYYHKNNKSWMESEGSGSGTSNFRVQPTESIVRFLDKYFKNHTSPD
VDLNKCVNFNFNGLTGTVEGFNCYFPLQSYGFQPT

TABLE 10
SEQ ID NO: 1683

ESEFRVYSSANNCTFEYVPPAYTNSFTRGVYYTGRLQSLQTYVTQQLFG
GFNFSQILPDPSKPSKRSLQSYGFQPTNGVGYQPY

TABLE 11
SEQ ID NO: 1684

PRTFLLKYNENGTITDAQTLLALHRSYLTPGDSSGGNYNYLYRLFRKSN
LKPFERDIFLGVYYHKNNKSWMESEESEFRVYSSANNCTFEYV

TABLE 12
SEQ ID NO: 1685

LSHFVNLDNLRANNTKGSLPIANYIFWRNTNPIQLSSYGPGPGDVDTDF
VNEFYAYLRKHFSMMILSD

TABLE 13
SEQ ID NO: 1686

LGSLIYSTAALGVLMSNLGMPSYGPGPGDQAISMWALIISVTSNYSGVV
TTVGPGPGVASIKNFKSVLYYQNNVFMSEAK

TABLE 14
SEQ ID NO: 1687

WPLIVTALRANSAVKLQKVGGNYNYLYRLFRKSNLKPFERDIMPNMLRI
MASLVLARKHT

TABLE 15
SEQ ID NO: 1688

LLPLTQYNRYLALYNKYKYFSGAMDGPGPGDMTYRRLISMMGFKMNYQV
GPGPGYEDLLIRKSNHNFLVQAGN

TABLE 16
SEQ ID NO: 1689

GDQFKHLIPLMYKGLPWNVVRIKGPGPGIPTITQMNLKYAISAKNRART
VAGGPGPGNSWLMWLIINLVQMAPISAMVRM

TABLE 17
SEQ ID NO: 1690

TAFVTNVNASSSEAFGPGPGLYFIKGLNNLNRGGPGPGRKAVFISPYNS
QNAVASKILGL

TABLE 18
SEQ ID NO: 1691

VDAVNLLTNMFTPLIQPIGALDKGRLIIRENNRVVISSGPGPGTERLKL
FAAETLKATEE

TABLE 19
SEQ ID NO: 1692

SSNVNRFNVAITRAKVGILSIMGPGPGGSLYVNKHAFHTPAFDTQSLLI
VNNATNWIKV

TABLE 41
SEQ ID NO: 2719

NSSFSRGETRCEQDLEGKGYHLMSFPQSAPHQTLLALHRSYLTPGDSSV
LSFELLHAPATVCGQKLIANQFNSAIGKIQDSLLKKLLEQWNLVIGFLF
LTWQIPFAMQMAYRFNGIGVPKEITVATSRTLSYYPTNFTISVTTEILP
VICLLQFAYANRNRFLYINDGVYFASTEKSNIIRTDEMIAQYTSALLAN
KCVNFNFNGLTGTGVLTEDGYFKIYSKHTPINLQDLFLPFFSNVTWFHA
IHVSGTNGTTGRLQSLQTYVTQQLGSGSGLACFVLAAVYRINWIVEGFN
CYFPLQSYGFQPTNGVGYQPYFLGVYYHKNNKSWMESEFRVYSSANNCT
FEYVLDKYFKNHTSPDVDLPPAYTNSFTRGVYYPRTFLLKYNENGTITD
ASRVKNLNSSRVPDTQSLLIVNNATNVVIKVGGNYNYLYRLFRKSNLKP
FERDIMYSFVSEETGTLIVNFGGFNFSQILPDPSKPSKRSLLQYGSFCT
QLNRALTGIAVEQISGINASVVNIQKEIDVVIGIVNNTVYDPLRGHLRI
AGHHLGRCDTSNFRVQPTESIVRFFGEVFNATRFASVYAWNRKRISNCV
ADYSVLYNSASFSTFKIGNYKLNTDHSSSSDNILSYFIASFRLFARTRS
MWSFNPETNILLNV

TABLE 42
SEQ ID NO: 2720

NSSFSRGETRCEQDLERGHLRIAGHHLGRCDGSGSGSGSLKKLLEQWNL
VIGFLFLTWGSGSGSGSTQSLLIVNNATNVVIKVGSGSGSGSDVVIGIV
NNTVYDPLGSGSGSGSIGNYKLNTDHSSSSDNIGSGSGSGSTGRLQSLQ
TYVTQQLGSGSGSGSDGYFKIYSKHTPINLGSGSGSGSPTNFTISVTTE
ILPVGSGSGSGSQIPFAMQMAYRFNGIGVGSGSGSGSSRVKNLNSSRVP
DGSGSGSGSTSNFRVQPTESIVRFGSGSGSGSISGINASVVNIQKEIGS
GSGSGSTDEMIAQYTSALLAGSGSGSGSFGGFNFSQILPDPSKPSKRSG
SGSGSGSLACFVLAAVYRINWIGSGSGSGSQDLFLPFFSNVTWFHAIHV
SGTNGTGSGSGSGSNDGVYFASTEKSNIIRGSGSGSGSNKCVNFNFNGL
TGTGVLTEGSGSGSGSGGNYNYLYRLFRKSNLKPFERDIGSGSGSGSPP
AYTNSFTRGVYYGSGSGSGSQTLLALHRSYLTPGDSSGSGSGSGSVLSF
ELLHAPATVCGGSGSGSGSFLGVYYHKNNKSWMESEFRVYSSANNCTFE
YVGSGSGSGSQKLIANQFNSAIGKIQDSLGSGSGSGSLLQYGSFCTQLN
RALTGIAVEQGSGSGSGSPRTFLLKYNENGTITDAGSGSGSGSVEGFNC
YFPLQSYGFQPTNGVGYQPYGSGSGSGSGKGYHLMSFPQSAPHGSGSGS
GSLSYFIASFRLFARTRSMWSFNPETNILLNVGSGSGSGSLDKYFKNHT
SPDVDLGSGSGSGSMYSFVSEETGTLIVNGSGSGSGSFGEVFNATRFAS
VYAWNRKRISNCVADYSVLYNSASFSTFKGSGSGSGSPKEITVATSRTL
SYYGSGSGSGSICLLQFAYANRNRFLYI

TABLE 43
SEQ ID NO: 2721

NSSFSRGETRCEQDLEGKGYHLMSFPQSAPHQTLLALHRSYLTPGDSSV
LSFELLHAPATVCGQKLIANQFNSAIGKIQDSLQIPFAMQMAYRFNGIG
VPKEITVATSRTLSYYPTNFTISVTTEILPVICLLQFAYANRNRFLYIN
DGVYFASTEKSNIIRTDEMIAQYTSALLANKCVNFNFNGLTGTGVLTED
GYFKIYSKHTPINLQDLFLPFFSNVTWFHAIHVSGTNGTTGRLQSLQTY
VTQQLVEGFNCYFPLQSYGFQPTNGVGYQPYFLGVYYHKNNKSWMESEF
RVYSSANNCTFEYVLDKYFKNHTSPDVDLPPAYTNSFTRGVYYPRTFLL
KYNENGTITDASRVKNLNSSRVPDTQSLLIVNNATNVVIKVGGNYNYLY
RLFRKSNLKPFERDIMYSFVSEETGTLIVNFGGFNFSQILPDPSKPSKR
SLACFVLAAVYRINWILLQYGSFCTQLNRALTGIAVEQISGINASVVNI
QKEIDVVIGIVNNTVYDPLRGHLRIAGHHLGRCDLKKLLEQWNLVIGFL
FLTWTSNFRVQPTESIVRFFGEVFNATRFASVYAWNRKRISNCVADYSV
LYNSASFSTFKIGNYKLNTDHSSSSDNILSYFIASFRLFARTRSMWSFN
PETNILLNV

TABLE 44
SEQ ID NO: 2722

NSSFSRGETRCEQDLEGKGYHLMSFPQSAPHQTLLALHRSYLTPGDSSV
LSFELLHAPATVCGQKLIANQFNSAIGKIQDSLQIPFAMQMAYRFNGIG
VPKEITVATSRTLSYYPTNFTISVTTEILPVICLLQFAYANRNRFLYIN
DGVYFASTEKSNIIRTDEMIAQYTSALLANKCVNFNFNGLTGTGVLTED
GYFKIYSKHTPINLQDLFLPFFSNVTWFHAIHVSGTNGTTGRLQSLQTY
VTQQLVEGFNCYFPLQSYGFQPTNGVGYQPYFLGVYYHKNNKSWMESEF
RVYSSANNCTFEYVLDKYFKNHTSPDVDLPPAYTNSFTRGVYYPRTFLL
KYNENGTITDASRVKNLNSSRVPDTQSLLIVNNATNVVIKVGGNYNYLY
RLFRKSNLKPFERDIMYSFVSEETGTLIVNFGGFNFSQILPDPSKPSKR
SLACFVLAAVYRINWIGPGPGLLQYGSFCTQLNRALTGIAVEQISGINA
SVVNIQKEIDVVIGIVNNTVYDPLRGHLRIAGHHLGRCDLKKLLEQWNL
VIGFLFLTWGPGPGTSNFRVQPTESIVRFFGEVFNATRFASVYAWNRKR
ISNCVADYSVLYNSASFSTFKIGNYKLNTDHSSSSDNILSYFIASFRLF
ARTRSMWSFNPETNILLNV

TABLE 45

SEQ ID NO: 2723
FLGVYYHKNNKSWMESEGSGSGTSNFRVQPTESIV
RFLDKYFKNHTSPDVDLNKCVNFNFNGLTGTVEGF
NCYFPLQSYGFQPTGPGPGSSDYTIVLPVIGAIVV
GLCLMGMGVYKIRLRCQSSGYQRI

TABLE 46

SEQ ID NO: 2724
ESEFRVYSSANNCTFEYVPPAYTNSFTRGVYYTGR
LQSLQTYVTQQLFGGFNFSQILPDPSKPSKRSLQS
YGFQPTNGVGYQPYGPGPGSSDYTIVLPVIGAIVV
GLCLMGMGVYKIRLRCQSSGYQRI

TABLE 47

SEQ ID NO: 2725
PRTFLLKYNENGTITDAQTLLALHRSYLTPGDSSG
GNYNYLYRLFRKSNLKPFERDIFLGVYYHKNNKSW
MESEESEFRVYSSANNCTFEYVGPGPGSSDYTIVL
PVIGAIVVGLCLMGMGVYKIRLRCQSSGYQRI

TABLE 48

SEQ ID NO: 2726
FLGVYYHKNNKSWMESEGSGSGTSNFRVQPTESIV
RFLDKYFKNHTSPDVDLNKCVNFNFNGLTGTVEGF
NCYFPLQSYGFQPTSSDYTIVLPVIGAIVVGLCLM
GMGVYKIRLRCQSSGYQRI

TABLE 49

SEQ ID NO: 2727
ESEFRVYSSANNCTFEYVPPAYTNSFTRGVYYTGR
LQSLQTYVTQQLFGGFNFSQILPDPSKPSKRSLQS
YGFQPTNGVGYQPYSSDYTIVLPVIGAIVVGLCLM
GMGVYKIRLRCQSSGYQRI

TABLE 50

SEQ ID NO: 2728
PRTFLLKYNENGTITDAQTLLALHRSYLTPGDSSG
GNYNYLYRLFRKSNLKPFERDIFLGVYYHKNNKSW
MESEESEFRVYSSANNCTFEYVSSDYTIVLPVIGA
IVVGLCLMGMGVYKIRLRCQSSGYQRI

TABLE 51

SEQ ID NO: 2729
MAAPGSARRPLLLLLLLLLLGLMHCASAAFLGVYY
HKNNKSWMESEGSGSGTSNFRVQPTESIVRFLDKY
FKNHTSPDVDLNKCVNFNFNGLTGTVEGFNCYFPL
QSYGFQPTGPGPGSSDYTIVLPVIGAIVVGLCLMG
MGVYKIRLRCQSSGYQRI

TABLE 52

SEQ ID NO: 2730
MAAPGSARRPLLLLLLLLLLGLMHCASAAESEFRV
YSSANNCTFEYVPPAYTNSFTRGVYYTGRLQSLQT
YVTQQLFGGFNFSQILPDPSKPSKRSLQSYGFQPT
NGVGYQPYGPGPGSSDYTIVLPVIGAIVVGLCLMG
MGVYKIRLRCQSSGYQRI

TABLE 53

SEQ ID NO: 2731
MAAPGSARRPLLLLLLLLLLGLMHCASAAPRTFLL
KYNENGTITDAQTLLALHRSYLTPGDSSGGNYNYL
YRLFRKSNLKPFERDIFLGVYYHKNNKSWMESEES
EFRVYSSANNCTFEYVGPGPGSSDYTIVLPVIGAI
VVGLCLMGMGVYKIRLRCQSSGYQRI

TABLE 54

SEQ ID NO: 2732
MAAPGSARRPLLLLLLLLLLGLMHCASAAGKGYHL
MSFPQSAPHQTLLALHRSYLTPGDSSVLSFELLHA
PATVCGQKLIANQFNSAIGKIQDSLQIPFAMQMAY
RFNGIGVPKEITVATSRTLSYYPTNFTISVTTEIL
PVICLLQFAYANRNRFLYINDGVYFASTEKSNIIR
TDEMIAQYTSALLANKCVNFNFNGLTGTGVLTEDG
YFKIYSKHTPINLQDLFLPFFSNVTWFHAIHVSGT
NGTTGRLQSLQTYVTQQLVEGFNCYFPLQSYGFQP
TNGVGYQPYFLGVYYHKNNKSWMESEFRVYSSANN
CTFEYVLDKYFKNHTSPDVDLPPAYTNSFTRGVYY
PRTFLLKYNENGTITDASRVKNLNSSRVPDTQSLL
IVNNATNVVIKVGGNYNYLYRLFRKSNLKPFERDI
MYSFVSEETGTLIVNFGGFNFSQILPDPSKPSKRS
LACFVLAAVYRINWIGPGPGLLQYGSFCTQLNRAL
TGIAVEQISGINASVVNIQKEIDVVIGIVNNTVYD
PLRGHLRIAGHHLGRCDLKKLLEQWNLVIGFLFLT
WGPGPGTSNFRVQPTESIVRFFGEVFNATRFASVY
AWNRKRISNCVADYSVLYNSASFSTFKIGNYKLNT
DHSSSSDNILSYFIASFRLFARTRSMWSFNPETNI
LLNVGPGPGSSDYTIVLPVIGAIVVGLCLMGMGVY
KIRLRCQSSGYQRI

TABLE 55

SEQ ID NO: 2733
MAAPGSARRPLLLLLLLLLLGLMHCASAAGKGYHL
MSFPQSAPHQTLLALHRSYLTPGDSSVLSFELLHA
PATVCGQKLIANQFNSAIGKIQDSLQIPFAMQMAY
RFNGIGVPKEITVATSRTLSYYPTNFTISVTTEIL
PVICLLQFAYANRNRFLYINDGVYFASTEKSNIIR
TDEMIAQYTSALLANKCVNFNFNGLTGTGVLTEDG
YFKIYSKHTPINLQDLFLPFFSNVTWFHAIHVSGT
NGTTGRLQSLQTYVTQQLVEGFNCYFPLQSYGFQP
TNGVGYQPYFLGVYYHKNNKSWMESEFRVYSSANN
CTFEYVLDKYFKNHTSPDVDLPPAYTNSFTRGVYY
GPGPGSSDYTIVLPVIGAIVVGLCLMGMGVYKIRL
RCQSSGYQRI

TABLE 56

SEQ ID NO: 2734
MAAPGSARRPLLLLLLLLLLGLMHCASAAPRTFLL
KYNENGTITDASRVKNLNSSRVPDTQSLLIVNNAT
NVVIKVGGNYNYLYRLFRKSNLKPFERDIMYSFVS
EETGTLIVNFGGFNFSQILPDPSKPSKRSLACFVL
AAVYRINWIGPGPGLLQYGSFCTQLNRALTGIAVE
QISGINASVVNIQKEIDVVIGIVNNTVYDPLRGHL
RIAGHHLGRCDLKKLLEQWNLVIGFLFLTWGPGPG
TSNFRVQPTESIVRFFGEVFNATRFASVYAWNRKR
ISNCVADYSVLYNSASFSTFKIGNYKLNTDHSSSS
DNILSYFIASFRLFARTRSMWSFNPETNILLNVGP
GPGSSDYTIVLPVIGAIVVGLCLMGMGVYKIRLRC
QSSGYQR

[0398] 2.2.—Reference datasets for individual antigens were compiled from SARS-CoV-2, SARS-CoV-1, MERS-CoV, and human CoV (HKU1, 0C43, NL63, 229E). All the protein sequences were downloaded from GenBank. As a first step, each of the protein sequences from the SARS-CoV-2 reference strain (Wuhan 1_2020; GenBank MN908947) were parsed into overlapping 9-mers. The binding potential of each 9-mer was predicted against a set of nine class II HLA supertype alleles using the EpiMatrix algorithm. To define regions that have an unusually high potential for immunogenicity (T cell epitope clusters), each SARS-CoV-2 protein was screened with the ClustiMer algorithm. EpiMatrix Cluster Scores were calculated for each identified T cell epitope cluster. T cell epitope clusters were then screened for cross-conservation against the human proteome using the JanusMatrix algorithm. T cell epitope clusters with JanusMatrix Human Homology Scores above two were considered as potentially tolerogenic (Tregitopes). To identify T cell epitope cluster cross-conserved with other coronaviruses, both the standard and a less stringent version of the JanusMatrix algorithm were applied. Finally, the Class I T cell epitope content for 9-mer and 10-mer frames of each T cell epitope clusters was identified for a set of six class I HLA supertype alleles using EpiMatrix.

[0399] SARS-CoV-2 T cell epitope clusters were next ranked based on Cluster Scores, JanusMatrix Human Homology Scores, and JanusMatrix Coronavirus Homology Scores. Peptides with Cysteines in their cores were excluded. The top 22 T cell epitope clusters were selected for vaccine design.

[0400] The selected T cell epitope clusters were then aggregated into epitope concatemers using the VaxCAD algorithm. VaxCAD also optimized the sequence arrangement to minimize Class I and II junctional epitope content. Gly-Pro-Gly-Pro-Gly spacer sequences were introduced between epitopes to remove junctional epitopes where reordering did not sufficiently reduce potential junctional immunogenicity. T cell epitope cluster flanking residues were extended or removed to further minimize junctional T cell epitope content. Nine concatemers were constructed with two or three T cell epitope clusters per concatemer. The peptides with identified originating protein and starting position utilized to generate the concatemers of SEQ ID NOS: 2593-2604 (FIG. 120) are presented in Tables 20-28. Table 29 also presents 9 concatemer constructs.

TABLE 20
Cocatemer 1

>ORF1AB_METHYLTRANSFERASE_0226
ANYIFWRNTNPIQLSSY (SEQ ID NO: 1713)
>ORF1AB_RNA_POLYMERASE_0738
DVDTDFVNEFYAYLRKHFSMMILSD
(SEQ ID NO: 1724)

TABLE 21
Concatemer 2

>ORF1AB_NSP60162
ISMWALIISVTSNYSGVVTTV
(SEQ ID NO: 172)
>ORF1AB_RNA_POLYMERASE_0776
VASIKNFKSVLYYQNNVFMSEAK
(SEQ ID NO: 1756)

TABLE 22
Concatemer 3

> ORF1AB NSP8 0182
WPLIVTALRANSAVKLQ
(SEQ ID NO: 1772)
> SPIKE_0446
KVGGNYNYLYRLFRKSNLKPFERDI
(SEQ ID NO: 1783)
> ORFIAB_RNA_POLYMERASE_0626
MPNMLRIMASLVLARKHT (SEQ ID NO 1801)

TABLE 23
Concatemer 4

>ORF1AB_NSP4_0435
LLPLTQYNRYLALYNKYKYFSGAMD (SEQ ID NO: 1812)
>ORF1AB_EXONUCLEASE_0048
DMTYRRLISMMGFKMNYQV (SEQ ID NO: 1831)

TABLE 24
Concatemer 5

>ORF1AB_EXONUCLEASE_0143
GDQFKHLIPLMYKGLPWNVVRIK (SEQ ID NO: 1844)
>ORF1AB_RNA_POLYMERASE_0539
IPTITQMNLKYAISAKNRARTVAG (SEQ ID NO: 1861)

TABLE 25
Concatemer 6

>ORF1AB_METHYLTRANSFERASE 0191
TAFVTNVNASSSEAF (SEQ ID NO: 1879)
>ORF1AB_NSP9_0088
LYFIKGLNNLNRG (SEQ ID NO: 1890)
>ORF1AB_HELICASE_0507
RKAVFISPYNSQNAVASKILGL (SEQ ID NO: 1898)

TABLE 26
Concatemer 7

>ORF1AB_NSP4_0258
VDAVNLLTNMFTPLIQPIGALD (SEQ ID NO: 1913)
>ORF1AB_METHYLTRANSFERASE_0277
KGRLIIRENNRVVISS (SEQ ID NO: 1929)
>ORF1AB_HELICASE_0127
TERLKLFAAETLKATEE (SEQ ID NO: 1939)

TABLE 27
Concatemer 8

>ORF1AB_HELICASE_0555
SSNVNRFNVAITRAKVGILSIM (SEQ ID NO: 1949)
>ORF1AB_EXONUCLEASE_0416
GGSLYVNKHAFHTPAFD (SEQ ID NO: 1965)
>SPIKE_0114
TQSLLIVNNATNVVIKV (SEQ ID NO: 1975)

TABLE 28
Concatemer 9

>ORF1AB_NSP3_1700
LSHFVNLDNLRANNTKGSLPI (SEQ ID NO: 1985)
>ORF1AB_PROTEINASE_0054
YEDLLIRKSNHNFLVQAGN (SEQ ID NO 1999)

TABLE 29

| Concatemer | Sequence |
|---|---|
| 1 | ANYIFWRNTNPIQLSSYGPGPGDVDTDFVNEFYAYLRK |
| | HFSMMILSD (SEQ ID NO: 2593) |
| 2 | ISMWALIISVTSNYSGVVTTVGPGPGVASIKNFKSVLY |
| | YQNNVFMSEAK (SEQ ID NO: 2594) |
| 3 | WPLIVTALRANSAVKLQKVGGNYNYLYRLFRKSNLKPF |
| | ERDIMPNMLRIMASLVLARKHT (SEQ ID NO: |
| | 2595) |
| 4 | LLPLTQYNRYLALYNKYKYFSGAMDGPGPGDMTYRRLI |
| | SMMGFKMNYQV (SEQ ID NO: 2596) |
| 5 | GDQFKHLIPLMYKGLPWNVVRIKGPGPGIPTITQMNLK |
| | YAISAKNRARTVAG (SEQ ID NO: 2597) |
| 6 | TAFVTNVNASSSEAFGPGPGLYFIKGLNNLNRGGPGPG |
| | RKAVFISPYNSQNAVASKILGL (SEQ ID NO: |
| | 2598) |
| 7 | VDAVNLLTNMFTPLIQPIGALDKGRLIIRENNRVVISS |
| | GPGPGTERLKLFAAETLKATEE (SEQ ID NO: |
| | 2599) |
| 8 | SSNVNRFNVAITRAKVGILSIMGPGPGGSLYVNKHAFH |
| | TPAFDTQSLLIVNNATNVVIKV (SEQ ID NO: |
| | 2600) |
| 9 | LSHFVNLDNLRANNTKGSLPIGPGPGYEDLLIRKSNHN |
| | FLVQAGN (SEQID NO: 2601) |

[0401] 2.3—34 class I and class II peptides were selected for inclusion in a third set of the instantly-disclosed vaccine constructs, following further immunoinformatic predictions. Peptides assessed in 2.1 above were further modified and assembled to produce the concatemeric peptides of SEQ ID NOS: 2602-2604 (and associated nucleic acid constructs encoding such) include the below sequences in TABLES 30-32 (SEQ ID NOS: 2605-2638—with original peptide source sequences also identified). The final concatemer sequences are presented in FIG. 120 (SEQ ID NOS: 2602-2604) and in Tables 33 and 34.

TABLE 30
>Spike 1044-SEQ ID NO: 2605-from SEQ ID NO: 655
GKGYHLMSFPQSAPH
>Spike 239-SEQ ID NO: 2606-from SEQ ID NO: 342
QTLLALHRSYLTPGDSS
>Spike 512-SEQ ID NO: 2607-from SEQ ID NO: 465
VLSFELLHAPATVCG
>Spike 920-SEQ ID NO: 2608-from SEQ ID NO: 578
QKLIANQFNS AIGKIQD SL
>Spike 895-SEQ ID NO: 2609-from SEQ ID NO: 568
QIPFAMQMAYRFNGIGV
>Membrane 165-SEQ ID NO: 2610-from SEQ ID NO: 178
PKEITVATSRTLSYY
>Spike 715-SEQ ID NO: 2611-from SEQ ID NO: 492
PTNFTISVTTEILPV
>Membrane 32-SEQ ID NO: 2612-from SEQ ID NO: 81
ICLLQFAYANRNRFLYI
>Spike 87-SEQ ID NO: 2613-from SEQ ID NO: 274
NDGVYFASTEKSNIIR
>Spike 866-SEQ ID NO: 2614-from SEQ ID NO: 556
TDEMIAQYTSALLA
>Spike 536-SEQ ID NO: 2615-from SEQ ID NO: 480
NKCVNFNFNGLTGTGVLTE
>Spike 198-SEQ ID NO: 2616-from SEQ ID NO: 320
DGYFKIYSKHTPINL
>Spike 52-SEQ ID NO: 2617-from SEQ ID NO: 251
QDLFLPFFSNVTWFHAIHVSGTNGT

TABLE 31
>SPIKE 998-SEQ ID NO: 2618-from SEQ ID NO: 626
TGRLQSLQTYVTQQL
>SPIKE 483-SEQ ID NO: 2619-from SEQ ID NO: 444
VEGFNCYFPLQSYGFQPTNGVGYQPY
>SPIKE 140-SEQ ID NO: 2620-from SEQ ID NO: 296
FLGVYYHKNNKSWMESEFRVYSSANNCTFEYV
>SPIKE 1152-SEQ ID NO: 2621-from SEQ ID NO: 677
LDKYFKNHTSPDVDL
>SPIKE 25-SEQ ID NO: 2622-from SEQ ID NO: 229
PPAYTNSFTRGVYY
>SPIKE 272-SEQ ID NO: 2623-from SEQ ID NO: 359
PRTFLLKYNENGTITDA
>ENV 60-SEQ ID NO: 2624-from SEQ ID NO: 46
SRVKNLNSSRVPD
>SPIKE 114-SEQ ID NO: 2625-from SEQ ID NO: 284
TQSLLIVNNATNVVIKV
>SPIKE 446-SEQ ID NO: 2626-from SEQ ID NO: 424
GGNYNYLYRLFRKSNLKPFERDI
>ENV 1-SEQ ID NO: 2627-from SEQ ID NO: 4
MYSFVSEETGTLIVN
>SPIKE 797-SEQ ID NO: 2628-from SEQ ID NO: 519
FGGFNFSQILPDPSKPSKRS

TABLE 32
MEMBRANE 60-SEQ ID NO: 2629-from SEQ ID NO: 116
SRVKNLNSSRVPD
>SPIKE 753-SEQ ID NO: 2630-from SEQ ID NO: 500
LLQYGSFCTQLNRALTGIAVEQ
>SPIKE 1169-SEQ ID NO: 2631-from SEQ ID NO: 686
ISGINASVVNIQKEI
>SPIKE 1127-SEQ ID NO: 2632-from SEQ ID NO: 668
DVVIGIVNNTVYDPL
>MEMBRANE 146-SEQ ID NO: 2633-from SEQ ID NO: 164
RGHLRIAGHHLGRCD
>MEMBRANE 13-SEQ ID NO: 2634-from SEQ ID NO: 69
LKKLLEQWNLVIGFLFLTW
>SPIKE 315-SEQ ID NO: 2635-from SEQ ID NO: 375
TSNFRVQPTESIVRF
>SPIKE 338-SEQ ID NO: 2636-from SEQ ID NO: 389
and 401
FGEVFNATRFASVYAWNRKRISNCVADYSVLYNSASFSTFK
>MEMBRANE 201-SEQ ID NO: 2637-from SEQ ID NO: 199
IGNYKLNTDHSSSSDNI
>MEMBRANE 93-SEQ ID NO: 2638-from SEQ ID NO: 129
LSYFIASFRLFARTRSMWSFNPETNILLNV

TABLE 33
SEQ ID NO: 2639
GKGYHLMSFPQSAPHQTLLALHRSYLTPGDSSVLSFELLHAPATVCGQKL
IANQFNSAIGKIQDSLQIPFAMQMAYRFNGIGVPKEITVATSRTLSYYPT
NFTISVTTEILPVICLLQFAYANRNRFLYINDGVYFASTEKSNIIRTDEM
IAQYTSALLANKCVNFNFNGLTGTGVLTEDGYFKIYSKHTPINLQDLFLP
FFSNVTWFHAIHVSGTNGTTGRLQSLQTYVTQQLVEGFNCYFPLQSYGFQ
PTNGVGYQPYFLGVYYHKNNKSWMESEFRVYSSANNCTFEYVLDKYFKNH
TSPDVDLPPAYTNSFTRGVYYPRTFLLKYNENGTITDASRVKNLNSSRVP
DTQSLLIVNNATNVVIKVGGNYNYLYRLFRKSNLKPFERDIMYSFVSEET
GTLIVNFGGFNFSQILPDPSKPSKRSLACFVLAAVYRINWIGPGPGLLQY
GSFCTQLNRALTGIAVEQISGINASVVNIQKEIDVVIGIVNNTVYDPLRG
HLRIAGHHLGRCDLKKLLEQWNLVIGFLFLTWGPGPGTSNFRVQPTESIV
RFFGEVFNATRFASVYAWNRKRISNCVADYSVLYNSASFSTFKIGNYKLN
TDHSSSSDNILSYFIASFRLFARTRSMWSFNPETNILLNV

TABLE 34
SEQ ID NO: 2640
GKGYHLMSFPQSAPHGSGSGQTLLALHRSYLTPGDSSGSGSGVLSFELLH
APATVCGGSGSGQKLIANQFNSAIGKIQDSLGSGSGQIPFAMQMAYRFNG
IGVGSGSGPKEITVATSRTLSYYGSGSGPTNFTISVTTEILPVGSGSGIC
LLQFAYANRNRFLYIGSGSGNDGVYFASTEKSNIIRGSGSGTDEMIAQYT
SALLAGSGSGNKCVNFNFNGLTGTGVLTEGSGSGDGYFKIYSKHTPINLG
SGSGQDLFLPFFSNVTWFHAIHVSGTNGTGSGSGTGRLQSLQTYVTQQLG
SGSGVEGFNCYFPLQSYGFQPTNGVGYQPYGSGSGFLGVYYHKNNKSWME
SEFRVYSSANNCTFEYVGSGSGLDKYFKNHTSPDVDLGSGSGPPAYTNSF
TRGVYYGSGSGPRTFLLKYNENGTITDAGSGSGSRVKNLNSSRVPDGSGS
GTQSLLIVNNATNVVIKVGSGSGGGNYNYLYRLFRKSNLKPFERDIGSGS
GMYSFVSEETGTLIVNGSGSGFGGFNFSQILPDPSKPSKRSGSGSGLACF
VLAAVYRINWIGPGPGLLQYGSFCTQLNRALTGIAVEQGSGSGISGINAS
VVNIQKEIGSGSGDVVIGIVNNTVYDPLGSGSGRGHLRIAGHHLGRCDGS
GSGLKKLLEQWNLVIGFLFLTWGPGPGTSNFRVQPTESIVRFGSGSGFGE
VFNATRFASVYAWNRKRISNCVADYSVLYNSASFSTFKGSGSGIGNYKLN
TDHSSSSDNIGSGSGLSYFIASFRLFARTRSMWSFNPETNILLNV

### Example 3: Administration of SARS-CoV-2 Vaccine

[0402] Vaccine construct designs are developed, such as is demonstrated in the specification, and in aspects as specifically exemplified in Example 2. In aspects, this results in a concatemeric polypeptide vaccine or an “epistring” that consists of overlapping T-cell epitopes. As described throughout, such vaccines may be used for stimulating, inducing, and/or expanding an immune response against SARS-CoV-2 infection (or a closely related virus such as Severe Acute Respiratory Syndrome (SARS) or Middle East respiratory syndrome coronavirus (MERS-CoV)) and/or related diseases caused by SARS-CoV-2, including COVID-19. In aspects, such vaccines initiate a strong T-cell mediated immune response, and has potential of inducing a humoral immune response.

[0403] Therefore, a vaccine containing a combination of the epistring together with either live attenuated virus (LAV) or inactivated virus is administered in an immunization trial in an appropriate animal model , e.g., mice, rats, rabbits, hamsters, etc., or even humans, as are known in the art. Data from administration of this combination vaccine provides positive results on the safety and effectiveness of the vaccine. This vaccination approach is expected to induce both cellular and humoral immune responses, thereby stimulating, inducing, and/or expanding an immune response against SARS-CoV-2 infection (or a closely related virus such as Severe Acute Respiratory Syndrome (SARS) or Middle East respiratory syndrome coronavirus (MERS-CoV)) and/or related diseases caused by SARS-CoV-2, including COVID-19, in humans.

### Example 4: Polypeptide Binding to MHC

### Methods for the Assessment Polypeptides as Disclosed Herein Binding to Soluble MHC.

[0404] Synthesis of peptides. The polypeptides of the present disclosure (e.g., but not limited to, a peptide or polypeptide comprising, consisting, or consisting essentially of an amino acid sequence of SEQ ID NOS: 4-1676, 1713-2595, 2605-2638, 2647-2718, and 2735-8692 (and/or fragments or variants thereof), and optionally 1 to 12 additional amino acids distributed in any ratio on the N terminus and/or C-terminus of the polypeptide of SEQ ID NOS: 4-1676, 1713-2595, 2605-2638, 2647-2718, and 2735-8692) are produced by direct chemical synthesis or by recombinant methods (J Sambrook et al., Molecular Cloning: A Laboratory Manual, (2ED, 1989), Cold Spring Harbor Laboratory Press, Cold Springs Harbor, N.Y. (Publ)). Every peptide undergoes rigorous quality control characterization before release to determine purity, mass, and correct sequence. Peptides are assessed for purity by reversed phase high-pressure liquid chromatography (RP-HPLC). Peptides are >90% pure, and each preparation will undergo Amino

[0405] Acid Analysis to ensure that the equivalent molar amounts are used in assays for consistency and reproducibility between different lots of peptides, and will also allow for reliable comparison studies between peptide efficacy. Peptides are assessed for mass and correct sequence using tandem mass spectrometry and MS CheckT analysis. In certain aspects, the polypeptides as disclosed herein may be capped with an n-terminal acetyl and/or c-terminal amino group. HPLC, mass spectrometry and UV scan (ensuring purity, mass and spectrum, respectively) analysis of the selected polypeptides will indicate ≥80% purity.

[0406] HLA Binding Assay. Binding activity is analyzed at EpiVax (Providence, Rhode Island) and is conducted for any polypeptides of the present disclosure (e.g., but not limited to, a peptide or polypeptide comprising, consisting, or consisting essentially of an amino acid sequence of SEQ ID NOS: 4-1676, 1713-2595, 2605-2638, 2647-2718, and 2735-8692 (and/or fragments or variants thereof), and optionally 1 to 12 additional amino acids distributed in any ratio on the N terminus and/or C-terminus of the polypeptide of SEQ ID NOS: 4-1676, 1713-2595, 2605-2638, 2647-2718, and 2735-8692). The binding assay used (Steere AC et al., (2006), J Exp Med, 2003(4):961-71) yields an indirect measure of peptide-MHC affinity. Soluble HLA molecules are loaded onto a 96-well plate with the unlabeled experimental polypeptides and labeled control peptide. Once the binding mixture reaches steady equilibrium (at 24 hours), the HLA-polypeptide complexes are captured on an ELISA plate coated with anti-human DR antibody and detected with a Europium-linked probe for the label (PerkinElmer, Waltham, Mass.). Time-resolved fluorescence measuring bound labeled control peptide is assessed by a SpectraMax® M5 unit (Spectramax, Radnor, Pa.). Binding of experimental polypeptides is expressed as the percent inhibition of the labeled control peptide (experimental fluorescence/control fluorescence multiplied by 100). The percent inhibition values for each experimental polypeptide (across a range of molar concentrations) is used to calculate the concentration at which it inhibits 50% of the labeled control polypeptide's specific binding, i.e., the polypeptides's IC_{50.}

[0407] Select experimental polypeptides are solvated in DMSO. The diluted polypeptide is mixed with binding reagents in aqueous buffering solution, yielding a range of final concentrations from 100,000 nM down to 100 nM. The select polypeptides are assayed against a panel of eight common Class II HLA alleles: DRB1*0101, DRB1*0301, DRB1*0401, DRB1*0701, DRB1*0801, DRB1*1101, DRB1*1301, and DRB1*1501. From the percent inhibition of labeled control peptide at each concentration, IC₅₀ values are derived for each polypeptide/allele combination using linear regression analysis.

[0408] In this assay, the experimental polypeptides are considered to bind with very high affinity if they inhibit 50% of control peptide binding at a concentration of 100 nM or less, high affinity if they inhibit 50% of control peptide binding at a concentration between 100 nM and 1,000 nM, and moderate affinity if they inhibit 50% of control peptide binding at a concentration between 1,000 nM and 10,000 nM. Low affinity peptides inhibit 50% of control peptide binding at concentrations between 10,000 nM and 100,000 nM. Peptides that fail to inhibit at least 50% of control peptide binding at any concentration below 100,000 nM and do not show a dose response are considered non-binders (NB).

### Peptide Characterization by Binding to HLA Class II Molecules

[0409] Soluble MHC binding assays are performed on any of the instantly disclosed polypeptides (e.g., but not limited to, a peptide or polypeptide comprising, consisting, or consisting essentially of an amino acid sequence of SEQ ID NOS: 4-1676, 1713-2595, 2605-2638, 2647-2718, and 2735-8692 (and/or fragments or variants thereof), and optionally 1 to 12 additional amino acids distributed in any ratio on the N terminus and/or C-terminus of the polypeptide of SEQ ID NOS: 4-1676, 1713-2595, 2605-2638, 2647-2718, and 2735-8692). Soluble MHC binding assays are performed on selected polypeptides as disclosed herein according to the methods described previously. IC₅₀ values (nM) will be derived from a six-point inhibition curve. EpiMatrix™ Predictions, calculated IC₅₀ values, and results classifications are reported for each polypeptide and HLA allele. Binding curves are generated for certain polypeptides against the selected Class II HLA alleles, such as for the HLA DRB1 *0801 assay and the HLA DRB1 *1501 assay.

### Example 5: Peptide Exposed APCs

### Methods for Assessing the Phenotype of PeptideExposed APC

[0410] Surface expression of Class II HLA (HLA-DR) and CD86 by professional antigen presenting cells (APCs) is one way APCs modulate T cell response. In this assay, candidate polypeptides are tested for their ability to effect (e.g., upregulate) the expression of Class II HLA and the co-stimulatory molecule CD86 on the surface of professional APCs, specifically dendritic cells.

[0411] Polypeptides of the present disclosure (e.g., but not limited to, a peptide or polypeptide comprising, consisting, or consisting essentially of an amino acid sequence of SEQ ID NOS: 4-1676, 1713-2595, 2605-2638, 2647-2718, and 2735-8692 (and/or fragments or variants thereof), and optionally 1 to 12 additional amino acids distributed in any ratio on the N terminus and/or C-terminus of the polypeptide of SEQ ID NOS: 4-1676, 1713-2595, 2605-2638, 2647-2718, and 2735-8692) are individually tested for effector potential using a proprietary APC phenotyping assay previously developed at EpiVax (EpiVax, Providence, R.I.). Previously harvested and frozen PBMC are thawed and suspended in chRPMI by conventional means. HLA typing is conducted on small, extracted samples of cellular material, provided by EpiVax, by Hartford Hospital (Hartford, Conn.). On assay day 0, 0.5×106 cells are extracted, screened for the presence of surface marker CD11c (a marker specific to dendritic cells) and are analyzed for the presence of surface markers HLA-DR and CD86 by flow cytometry. The remaining cells are plated (4.0×106 cell per ml in chRPMI plus 800u1 media) and are stimulated (50 μg/mL) with one of the selected peptides or positive and negative controls including buffer only (negative control), Tregitope 167 (negative control for effector activity) (21st Century Biochemicals, Marlboro, Mass.), Flu-HA 306-318 (positive control) (21ST Century Biochemicals, Marlboro, Mass.) and Ova 323-339 (negative control) (21st Century Biochemicals, Marlboro, Mass.). Plated cells are incubated for seven days at 37° C. On assay day 7, incubated cells are screened by flow cytometry for the presence of surface marker CD11c. CD11c positive cells are then analyzed for the presence of surface markers HLA-DR and CD86. The experimental peptides are tested in samples drawn from five different human donors.

[0412] Leukocyte Reduction Filters are obtained from the Rhode Island Blood Center (Providence, R.I.) to filter white blood cells from whole blood obtained from healthy donors. After the whole blood is run through the filters, the filters are flushed in the opposite direction to push collected white blood cells out of the filter. The white blood cells are isolated using a conventional

[0413] Ficoll™ separation gradient (GE Healthcare). The collected white blood cells are thereafter frozen for future use. When needed for use in an assay, the frozen white blood cells are thawed using conventional methods. For the GvHD studies discussed below, PBMCs are obtained (e.g., from HemaCare, Van Nuys, Calif.).

[0414] Exposure to the instantly disclosed polypeptides as disclosed herein on the phenotypes of dendritic cells is measured by multiple means. First, for each experimental condition, dot-plots, contrasting surface expression of CD11c and HLA-DR, is produced. Dot-plots of cells exposed to all control and experimental peptides are overlaid onto dot-plots produced from control cells exposed to only the culture media. The overlay provides an effective method to visually observe shifts in HLA-DR distribution between polypeptide stimulated, and unstimulated CD11c-high cells (data not shown). Observed shifts in the distribution of HLA-DR are reported as a qualitative measure. Next, the change in intensity of HLA-DR expression for the CD11c-high segment of each dot-plot is calculated. Percent change in intensity of HLA-DR expression equals Mean Florescence Index (MFI) of HLA-DR expression for peptide exposed cells minus MFI of HLA-DR expression for media exposed cells divided by 1MFI of HLA-DR expression for media exposed cells, times 100 (HLA-DRMFIpeptide−HLA-DRMFImedia/HLA-DRMFImedia*100). Next, the percent change in the percentage of HLA-DR-low cells present among the CD11c high population is calculated for each peptide relative to media control. Percent change in the percentage of HLA-DR-low cells is calculated, and equals the percent of HLA-DR-low for peptide exposed cells minus the percent of HLA-DR-low for media exposed cells divided by percent of HLA-DR-low for media exposed cells times 100 (HLA-DR-low % peptide−HLA-DR-low %media/HLA-DR-low % media*100). In this assay, a negative change in observed HLA-DR MFI and a positive change in percentage of HLA-DR-low cells present in the CD11c-high population indicates reduced expression of HLA and a shift to a regulatory APC phenotype. In this assay, a positive change in observed HLA-DR 1MFI and a negative change in percentage of HLA-DR-low cells present in the CD11c-high population indicates increased expression of HLA and a shift to an effector APC phenotype.

[0415] A similar process will be used to assess the impact of the instantly-disclosed polypeptides exposure on surface expression of CD86, which is a costimulatory molecule known to promote T cell activation. First, for each experimental condition, dot plots contrasting surface expression of CD11c and CD86 are produced. Dot plots of cells exposed to all control and experimental

[0416] Tregitopes are overlaid onto dots plots produced from control cells exposed to only the culture media. The overlay provides an effective method to visually observe shifts in CD86 distribution between polypeptide stimulated and un-stimulated CD11c-high cells. Observed shifts in the distribution of CD86 are reported as a qualitative measure. Next, the change in intensity of CD86-high expression for the CD11c-high segment of each dot plot is calculated. Percent change in intensity of CD86-high expression equals Mean Florescence Index (MFI) of CD86 expression for peptide exposed cells minus 1MFI of CD86-high expression for media exposed cells divided by MFI of CD86 expression for media exposed cells, times 100 (CD86-highMFIpeptide−CD86-highMFImedia/CD86-highMFImedia*100). Next, the percent change in the percentage of CD86-low cells present among the CD11c high population is calculated. Percent change in the percentage of CD86-high cells equals the percent of CD86-high for peptide exposed cells minus the percent of CD86-high for media exposed cells divided by percent of CD86-high for media exposed cells, times 100 (CD86-low % Ipeptide−CD86-low %media/CD86-low % media*100). In this assay, a negative change in observed CD86 1MFI and a positive change in percentage of CD86-low cells present in the CD11c-high population indicates reduced expression of CD86 and a shift to a regulatory APC phenotype. In this assay, a positive change in observed CD86 MFI and a negative change in percentage of CD86-low cells present in the CD1 is-high population indicates increased expression of CD86 and a shift to an effector APC phenotype.

### Characterization of Peptide Exposed APC

[0417] Dendritic cell phenotyping assays are performed on the polypeptides of the instant disclosure according to the methods described previously.

[0418] Dot plots representing the surface expression of CD11 vs HLA-DR will be analyzed on assay day 7 across the five donors in the presence of various peptide stimulants. In aspects, it is expected that upward movement of the CD11c+/HLA-DR+ population will apparent in the samples treated with the effector polypeptides of the instant disclosure (e.g., select polypeptides of the instant disclosure (e.g., but not limited to, a peptide or polypeptide comprising, consisting, or consisting essentially of an amino acid sequence of SEQ ID NOS: 4-1676, 1713-2595, 2605-2638, 2647-2718, and 2735-8692 (and/or fragments or variants thereof), and optionally 1 to 12 additional amino acids distributed in any ratio on the N terminus and/or C-terminus of the polypeptide of SEQ ID NOS: 4-1676, 1713-2595, 2605-2638, 2647-2718, and 2735-8692), including the concatemeric peptides of SEQ ID NOS: 1677-1692, 2593-2604, 2639-2646, and 2719-2734)), excluding one or more of a peptide or polypeptide having an amino acid sequence comprising, consisting of, or consisting essentially of one or more of SEQ ID NOS: 1056-1057, 1059, 1367-1368, 1370, 1063, 1068, 101, 1374, 1379, 1382, 1073, 1075, 1083-1084, 1094, 1101, 1103, 1108, 1111, 1112, 1117, 1384, 1386, 1394-1395, 1405, 1412, 1414, 1419, 1422, 1423, 1428, 1125, 1436, 1131, 1133, 1134, 1442, 1444, 1445, 1141, 1452, 1142, 1145, 1453, 1456, 1152, 1157, 1159, 1164, 1463, 1468, 1470, 1475,1176, 1178, 1179, 1182, 1204, 1205, 1209, 1214, 1230, 1487, 1489 1490, 1493, 1499, 1515, 1516, 1520, 1525, 1541, 1237, 1245, 1251, 1253, 1548, 1556, 1562, 1564, 1260, 1264, 1266, 1274, 1571, 1575, 1577, 1585, 1275, 1276, 1586, 1587, 1278, 1589, 1284, 1286, 1595, 1597, 1292, 1301, 1303, 1603, 1612, 1614, 1316, 1321, 1329, 1330, 1627, 1632, 1640, 1641, 1340, 1651, 1350, 1352, 1661, 1663, 1358, 1361, 1364, 1669, 1672, and/or 1675) as compared to media control indicating an acquired effector phenotype. In aspects, it is expected that downward movement of the CD11c+/HLA-DR+ population will apparent in the samples treated with the Tregitopes of the instant disclosure (one or more of a peptide or polypeptide having an amino acid sequence comprising, consisting of, or consisting essentially of one or more of SEQ ID NOS: 1056-1057, 1059, 1367-1368, 1370, 1063, 1068, 101, 1374, 1379, 1382, 1073, 1075, 1083-1084, 1094, 1101, 1103, 1108, 1111, 1112, 1117, 1384, 1386, 1394-1395, 1405, 1412, 1414, 1419, 1422, 1423, 1428, 1125, 1436, 1131, 1133, 1134, 1442, 1444, 1445, 1141, 1452, 1142, 1145, 1453, 1456, 1152, 1157, 1159, 1164, 1463, 1468, 1470, 1475,1176, 1178, 1179, 1182, 1204, 1205, 1209, 1214, 1230, 1487, 1489 1490, 1493, 1499, 1515, 1516, 1520, 1525, 1541, 1237, 1245, 1251, 1253, 1548, 1556, 1562, 1564, 1260, 1264, 1266, 1274, 1571, 1575, 1577, 1585, 1275, 1276, 1586, 1587, 1278, 1589, 1284, 1286, 1595, 1597, 1292, 1301, 1303, 1603, 1612, 1614, 1316, 1321, 1329, 1330, 1627, 1632, 1640, 1641, 1340, 1651, 1350, 1352, 1661, 1663, 1358, 1361, 1364, 1669, 1672, and/or 1675) as compared to media control indicating an acquired regulatory phenotype.

[0419] Dot plots representing the surface expression of CD11c vs CD86 will be analyzed on assay day 7 across the five donors in the presence of various peptide stimulants. It is expected that an increase in CD86-hi cells present in the samples treated with effector polypeptides of the instant disclosure (e.g., a peptide or polypeptide comprising, consisting, or consisting essentially of an amino acid sequence of SEQ ID NOS: 4-1676, 1713-2595, 2605-2638, 2647-2718, and 2735-8692 (and/or fragments or variants thereof), and optionally 1 to 12 additional amino acids distributed in any ratio on the N terminus and/or C-terminus of the polypeptide of SEQ ID NOS: 4-1676, 1713-2595, 2605-2638, 2647-2718, and 2735-8692), including the concatemeric peptides of SEQ ID NOS: 1677-1692, 2593-2604, 2639-2646, and 2719-2734)), excluding one or more of a peptide or polypeptide having an amino acid sequence comprising, consisting of, or consisting essentially of one or more of SEQ ID NOS: 1056-1057, 1059, 1367-1368, 1370, 1063, 1068, 101, 1374, 1379, 1382, 1073, 1075, 1083-1084, 1094, 1101, 1103, 1108, 1111, 1112, 1117, 1384, 1386, 1394-1395, 1405, 1412, 1414, 1419, 1422, 1423, 1428, 1125, 1436, 1131, 1133, 1134, 1442, 1444, 1445, 1141, 1452, 1142, 1145, 1453, 1456, 1152, 1157, 1159, 1164, 1463, 1468, 1470, 1475,1176, 1178, 1179, 1182, 1204, 1205, 1209, 1214, 1230, 1487, 1489 1490, 1493, 1499, 1515, 1516, 1520, 1525, 1541, 1237, 1245, 1251, 1253, 1548, 1556, 1562, 1564, 1260, 1264, 1266, 1274, 1571, 1575, 1577, 1585, 1275, 1276, 1586, 1587, 1278, 1589, 1284, 1286, 1595, 1597, 1292, 1301, 1303, 1603, 1612, 1614, 1316, 1321, 1329, 1330, 1627, 1632, 1640, 1641, 1340, 1651, 1350, 1352, 1661, 1663, 1358, 1361, 1364, 1669, 1672, and/or 1675)) as compared to media control, which indicates a shift to the acquired effector phenotype.

### Example 6: Memory T cell Responses to SARS-CoV-2 in COVID-19 Convalescents Materials and Methods

[0420] Peptide synthesis. Synthetic peptides were manufactured using 9-fluoronylmethoxycarbonyl (Fmoc) chemistry by 21st Century Biochemicals (Marlboro, Mass.). Peptide purity was >90% as ascertained by analytical reversed phase HPLC. Peptide mass was confirmed by tandem mass spectrometry.

[0421] SARS-CoV-2 convalescent donors. Convalescent patients were recruited by Sanguine Biosciences, a clinical services group that identified, consented and enrolled participants. Inclusion criteria included subjects (i) willing and able to provide written informed consent and photo identification, (ii) aged 18-60, both male or female, (iii) confirmed COVID-19 diagnosis (recovered) with date of diagnosis a minimum of 30 days from blood collection, and (iv) positive COVID-19 PCR based-kit documented by time-stamped medical record and/or diagnostic test report and test kit used identified. Exclusion criteria included subjects who (i) are pregnant or nursing, (ii) have a known history of HIV, hepatitis or other infectious diseases, (iii) have autoimmune diseases, (iv) in vulnerable patient population (prisoners, mentally impaired), (v) have medical conditions impacting their ability to donate blood (i.e. anemia, acute illness) (vi) received immunosuppressive therapy or steroids within the last 6 months , (vii) received an investigational product in the last 30 days, (viii) experienced excess blood loss including blood donation defined as 250 mL in the last month or 500 mL in the last two months, or (ix) had a positive COVID-19 PCR test, but were asymptomatic. Samples were collected in accordance with NIH regulations and with IRB approval.

[0422] Healthy unexposed donors. Samples were obtained from leukocyte reduction filters from the Rhode Island Blood Center for unrelated studies prior to the SARS-CoV-2 outbreak in December 2019. Samples were collected in accordance with NIH regulations and with IRB approval.

[0423] PBMC culture. Thawed whole PBMCs (normal healthy donors) were rested overnight and expanded by antigen stimulation (including select polypeptides of the instant disclosure (e.g., but not limited to, a peptide or polypeptide comprising, consisting, or consisting essentially of an amino acid sequence of SEQ ID NOS: 4-1676, 1713-2595, 2605-2638, 2647-2718, and 2735-8692 (and/or fragments or variants thereof), and optionally 1 to 12 additional amino acids distributed in any ratio on the N terminus and/or C-terminus of the polypeptide of SEQ ID NOS:

[0424] 4-1676, 1713-2595, 2605-2638, 2647-2718, and 2735-8692), including the concatemeric peptides of SEQ ID NOS: 1677-1692, 2593-2604, 2639-2646, and 2719-2734)) over nine days at 37° C. under a 5% CO2 atmosphere. In a 48-well plate, 5×10¹\6 cells in 150 _{I}ll RPMI medium supplemented with human AB serum were stimulated with pools of peptides at 10 μg/ml on Day 1. Three days later, IL-2 was added to 10 ng/ml and the culture volume raised to 300 _{I}ll. On Day 7, cells were supplemented with 10 ng/ml IL-2 by half media replacement. Two days later, PBMCs were collected and washed in preparation to measure immune recall responses.

[0425] FluoroSpot Assay. Interferon-gamma (IFNg) Fluorospot assays were performed ex vivo and following culture using kits purchased from Mabtech and performed according to the manufacturer's specifications. Peptides were added individually at 10 μg/ml and pooled at 10 μg/ml (8 peptides, 1.25 μg/mL) to triplicate wells containing 250,000 PBMCs (ex vivo) or 100,000 PBMCs (cultured) in RPMI medium supplemented with 10% human AB serum. Triplicate wells were plated with ConA (10 μg/ml) as a positive control, and six wells containing no antigen stimulus were used for background determination. Cells were incubated for 40-48 hours at 37° C. under a 5% CO2 atmosphere. Plates were developed according to the manufacturer's directions using FITC-labeled anti-IFN-γ detection antibody.

[0426] Raw spot counts were recorded by ZellNet Consulting, Inc. using a FluoroSpot reader system (iSpot Spectrum, AID, Strassberg, Germany) with software version 7.0, build 14790, where fluorescent spots were counted utilizing separate filters for FITC, Cy3, and Cy5. Camera exposure and gain settings were adapted for each filter to obtain high quality spot images preventing over- or underexposure. Fluorophore-specific spot parameters were defined using spot size, spot intensity and spot gradient (fading of staining intensity from center to periphery of spot), and a spot separation algorithm was applied for optimal spot detection.

[0427] Results were calculated as the average number of spots in the peptide wells, adjusted to spots per one million cells. Responses meeting the following criteria are positive when the number of spots is (i) at least twice background, (ii) greater than 50 spot forming cells per well above background (1 response per 20,000 PBMCs), and (iii) statistically different (p<0.05) from the media-only control by the Student's t test.

[0428] Results:

[0429] For FIG. 63A-68, peptide 1 (or rank 1) is SEQ ID NO: 1091 (cluster SEQ ID NO: 1401); peptide 2 (or rank 2) is SEQ ID NO: 1062 (cluster SEQ ID NO: 1373); peptide 3 (or rank 3) is SEQ ID NO: 1085 (cluster SEQ ID NO: 1395); peptide 4 (or rank 4) is SEQ ID NO: 1066 (cluster SEQ ID NO: 1377); peptide 5 (or rank 5) is SEQ ID NO: 1080 (cluster SEQ ID NO: 1391); peptide 6 (or rank 6) is SEQ ID NO: 1081 (cluster SEQ ID NO: 1392); peptide 7 (or rank 7) is SEQ ID NO: 1065 (cluster SEQ ID NO: 1376); peptide 8 (or rank 8) is SEQ ID NO: 1092 (cluster SEQ ID NO: 1403); peptide 9 (or rank 9) is SEQ ID NO: 1104 (cluster SEQ ID NO: 1415); peptide 10 (or rank 10) is SEQ ID NO: 1071 (cluster SEQ ID NO: 1382); peptide 11 (or rank 11) is SEQ ID NO: 1107 (cluster SEQ ID NO: 1418); peptide 12 (or rank 12) is SEQ ID NO: 1072 (cluster SEQ ID NO: 1383); peptide 13 (or rank 13) is SEQ ID NO: 1074 (cluster SEQ ID NO: 1384); peptide 14 (or rank 14) is SEQ ID NO: 1115 (cluster SEQ ID NO: 1426); peptide 15 (or rank 15) is SEQ ID NO: 1096 (cluster SEQ ID NO: 1407); peptide 16 (or rank 16) is SEQ ID NO: 1110 (cluster SEQ ID NO: 1421); peptide 17 (or rank 17) is SEQ ID NO: 1116 (cluster SEQ ID NO: 1427); peptide 18 (or rank 18) is SEQ ID NO: 1105 (cluster SEQ ID NO: 1416); peptide 19 (or rank 19) is SEQ ID NO: 1055 (cluster SEQ ID NO: 1366); peptide 20 (or rank 20) is SEQ ID NO: 1070 (cluster SEQ ID NO: 1381); peptide 21 (or rank 21) is SEQ ID NO: 1086 (cluster SEQ ID NO: 1397); peptide 22 (or rank 22) is SEQ ID NO: 1089 (cluster SEQ ID NO: 1400); peptide 23 (or rank 23) is SEQ ID NO: 1069 (cluster SEQ ID NO: 1380); peptide 24 (or rank 24) is SEQ ID NO: 1120 (cluster SEQ ID NO: 1430); peptide 25 (or rank 25) is SEQ ID NO: 1087 (cluster SEQ ID NO: 1398); peptide 26 (or rank 26) is SEQ ID NO: 1100 (cluster SEQ ID NO: 1411); peptide 27 (or rank 27) is SEQ ID NO: 1093 (cluster SEQ ID NO: 1404); peptide 28 (or rank 28) is SEQ ID NO: 1106 (cluster SEQ ID NO: 1417); peptide 29 (or rank 29) is SEQ ID NO: 1113 (cluster SEQ ID NO: 1424); peptide 30 (or rank 30) is SEQ ID NO: 1060 (cluster SEQ ID NO: 1371); peptide 31 (or rank 31) is SEQ ID NO: 1088 (cluster SEQ ID NO: 1399); and peptide 32 (or rank 32) is SEQ ID NO: 1082 (cluster SEQ ID NO: 1393). Additionally, pool A includes the following: SEQ ID NO: 1091 (cluster SEQ ID NO: 1401); SEQ ID NO: 1062 (cluster SEQ ID NO: 1373); SEQ ID NO: 1085 (cluster SEQ ID NO: 1395); SEQ ID NO: 1066 (cluster SEQ ID NO: 1377); SEQ ID NO: 1080 (cluster SEQ ID NO: 1391); SEQ ID NO: 1081 (cluster SEQ ID NO: 1392); SEQ ID NO: 1065 (cluster SEQ ID NO: 1376); SEQ ID NO: 1092 (cluster SEQ ID NO: 1403). Pool B includes the following: SEQ ID NO: 1104 (cluster SEQ ID NO: 1415); SEQ ID NO: 1071 (cluster SEQ ID NO: 1382); SEQ ID NO: 1107 (cluster SEQ ID NO: 1418); SEQ ID NO: 1072 (cluster SEQ ID NO: 1383); SEQ ID NO: 1074 (cluster SEQ ID NO: 1384); SEQ ID NO: 1115 (cluster SEQ ID NO: 1426); SEQ ID NO: 1096 (cluster SEQ ID NO: 1407); SEQ ID NO: 1110 (cluster SEQ ID NO: 1421). Pool C includes the following: peptide SEQ ID NO: 1116 (cluster SEQ ID NO: 1427); SEQ ID NO: 1105 (cluster SEQ ID NO: 1416); SEQ ID NO: 1055 (cluster SEQ ID NO: 1366); SEQ ID NO: 1070 (cluster SEQ ID NO: 1381); SEQ ID NO: 1086 (cluster SEQ ID NO: 1397); SEQ ID NO: 1089 (cluster SEQ ID NO: 1400); SEQ ID NO: 1069 (cluster SEQ ID NO: 1380); SEQ ID NO: 1120 (cluster SEQ ID NO: 1430) Pool D includes the following: SEQ ID NO: 1087 (cluster SEQ ID NO: 1398); SEQ ID NO: 1100 (cluster SEQ ID NO: 1411); SEQ ID NO: 1093 (cluster SEQ ID NO: 1404); SEQ ID NO: 1106 (cluster SEQ ID NO: 1417); SEQ ID NO: 1113 (cluster SEQ ID NO: 1424); SEQ ID NO: 1060 (cluster SEQ ID NO: 1371); SEQ ID NO: 1088 (cluster SEQ ID NO: 1399); and SEQ ID NO: 1082 (cluster SEQ ID NO: 1393).

[0430] As shown in FIG. 63A and FIG. 63B, ex vivo immune recall responses differentiate SARS-CoV-2 naïve and experienced individuals and exhibit different COVID-19 immunotypes. Robust and failed immune responses in convalescent donors may represent different immunotypes characterized in a deep immune profiling study of SARS-CoV-2 experienced humans (Giles et al. Deep immune profiling of COVID-19 patients reveals distinct immunotypes with therapeutic implications. Science. 2020 Jul. 15:eabc8511. doi: 10.1126/science.abc8511. PMID: 32669297, herein incorporated by reference in its entirety). In aspects, a polypeptide of the instant disclosure (e.g., a peptide or polypeptide comprising, consisting, or consisting essentially of an amino acid sequence of SEQ ID NOS: 4-1676, 1713-2595, 2605-2638, 2647-2718, and 2735-8692 (and/or fragments or variants thereof), and optionally 1 to 12 additional amino acids distributed in any ratio on the N terminus and/or C-terminus of the polypeptide of SEQ ID NOS: 4-1676, 1713-2595, 2605-2638, 2647-2718, and 2735-8692), including the concatemeric peptides of SEQ ID NOS: 1677-1692, 2593-2604, 2639-2646, and 2719-2734)), excluding one or more of a peptide or polypeptide having an amino acid sequence comprising, consisting of, or consisting essentially of one or more of SEQ ID NOS: 1056-1057, 1059, 1367-1368, 1370, 1063, 1068, 101, 1374, 1379, 1382, 1073, 1075, 1083-1084, 1094, 1101, 1103, 1108, 1111, 1112, 1117, 1384, 1386, 1394-1395, 1405, 1412, 1414, 1419, 1422, 1423, 1428, 1125, 1436, 1131, 1133, 1134, 1442, 1444, 1445, 1141, 1452, 1142, 1145, 1453, 1456, 1152, 1157, 1159, 1164, 1463, 1468, 1470, 1475,1176, 1178, 1179, 1182, 1204, 1205, 1209, 1214, 1230, 1487, 1489 1490, 1493, 1499, 1515, 1516, 1520, 1525, 1541, 1237, 1245, 1251, 1253, 1548, 1556, 1562, 1564, 1260, 1264, 1266, 1274, 1571, 1575, 1577, 1585, 1275, 1276, 1586, 1587, 1278, 1589, 1284, 1286, 1595, 1597, 1292, 1301, 1303, 1603, 1612, 1614, 1316, 1321, 1329, 1330, 1627, 1632, 1640, 1641, 1340, 1651, 1350, 1352, 1661, 1663, 1358, 1361, 1364, 1669, 1672, and/or 1675)) are expected to elicit a strong effector immune recall response (such as production of effector cytokines, e.g., IFN-γ). In aspects, one or more of a peptide or polypeptide having an amino acid sequence comprising, consisting of, or consisting essentially of one or more of SEQ ID NOS: 1056-1057, 1059, 1367-1368, 1370, 1063, 1068, 101, 1374, 1379, 1382, 1073, 1075, 1083-1084, 1094, 1101, 1103, 1108, 1111, 1112, 1117, 1384, 1386, 1394-1395, 1405, 1412, 1414, 1419, 1422, 1423, 1428, 1125, 1436, 1131, 1133, 1134, 1442, 1444, 1445, 1141, 1452, 1142, 1145, 1453, 1456, 1152, 1157, 1159, 1164, 1463, 1468, 1470, 1475,1176, 1178, 1179, 1182, 1204, 1205, 1209, 1214, 1230, 1487, 1489 1490, 1493, 1499, 1515, 1516, 1520, 1525, 1541, 1237, 1245, 1251, 1253, 1548, 1556, 1562, 1564, 1260, 1264, 1266, 1274, 1571, 1575, 1577, 1585, 1275, 1276, 1586, 1587, 1278, 1589, 1284, 1286, 1595, 1597, 1292, 1301, 1303, 1603, 1612, 1614, 1316, 1321, 1329, 1330, 1627, 1632, 1640, 1641, 1340, 1651, 1350, 1352, 1661, 1663, 1358, 1361, 1364, 1669, 1672, and/or 1675 are not expected to elicit a strong effector immune recall response (such as production of effector cytokines, e.g., IFN-γ, but rather will produce a regulatory response (e.g., production of regulatory cytokines, e.g., IL-10).

[0431] As shown in FIG. 64A and FIG. 64B, strong ex vivo immune recall responses are found found in SARS-CoV-2 experienced individuals using polypeptides of the instant disclosure. In aspects, a polypeptide of the instant disclosure (e.g., a peptide or polypeptide comprising, consisting, or consisting essentially of an amino acid sequence of SEQ ID NOS: 4-1676, 1713-2595, 2605-2638, 2647-2718, and 2735-8692 (and/or fragments or variants thereof), and optionally 1 to 12 additional amino acids distributed in any ratio on the N terminus and/or C-terminus of the polypeptide of SEQ ID NOS: 4-1676, 1713-2595, 2605-2638, 2647-2718, and 2735-8692), including the concatemeric peptides of SEQ ID NOS: 1677-1692, 2593-2604, 2639-2646, and 2719-2734)), excluding one or more of a peptide or polypeptide having an amino acid sequence comprising, consisting of, or consisting essentially of one or more of SEQ ID NOS: 1056-1057, 1059, 1367-1368, 1370, 1063, 1068, 101, 1374, 1379, 1382, 1073, 1075, 1083-1084, 1094, 1101, 1103, 1108, 1111, 1112, 1117, 1384, 1386, 1394-1395, 1405, 1412, 1414, 1419, 1422, 1423, 1428, 1125, 1436, 1131, 1133, 1134, 1442, 1444, 1445, 1141, 1452, 1142, 1145, 1453, 1456, 1152, 1157, 1159, 1164, 1463, 1468, 1470, 1475,1176, 1178, 1179, 1182, 1204, 1205, 1209, 1214, 1230, 1487, 1489 1490, 1493, 1499, 1515, 1516, 1520, 1525, 1541, 1237, 1245, 1251, 1253, 1548, 1556, 1562, 1564, 1260, 1264, 1266, 1274, 1571, 1575, 1577, 1585, 1275, 1276, 1586, 1587, 1278, 1589, 1284, 1286, 1595, 1597, 1292, 1301, 1303, 1603, 1612, 1614, 1316, 1321, 1329, 1330, 1627, 1632, 1640, 1641, 1340, 1651, 1350, 1352, 1661, 1663, 1358, 1361, 1364, 1669, 1672, and/or 1675)) are expected to elicit a strong ex vivo immune recall responses. 4-1676, 1713-2595, 2605-2638, 2647-2718, and 2735-86924-1676, 1713-2595, 2605-2638, 2647-2718, and 2735-86921677-1692, 2593-2604, 2639-2646, and 2719-2734

[0432] As shown in FIG. 65, polypeptides of the instant disclosure 4-1676, 1713-2595, 2605-2638, 2647-2718, and 2735-86924-1676, 1713-2595, 2605-2638, 2647-2718, and 2735-86921677-1692, 2593-2604, 2639-2646, and 2719-2734 stimulate ex vivo immune recall response in natural SARS-CoV-2 infection. In this exemplary study, of 32 tested peptides, 15 testes peptides demonstrated positive responses, as shown in green, in at least one donor. External data is shown from the preprint of Peng et al. bioRxiv [Preprint]. 2020 Jun. 8 PMID: 32577665; PMCID: PMC7302222. In aspects, a polypeptide of the instant disclosure (e.g., a peptide or polypeptide comprising, consisting, or consisting essentially of an amino acid sequence of SEQ ID NOS: 4-1676, 1713-2595, 2605-2638, 2647-2718, and 2735-8692 (and/or fragments or variants thereof), and optionally 1 to 12 additional amino acids distributed in any ratio on the N terminus and/or C-terminus of the polypeptide of SEQ ID NOS: 4-1676, 1713-2595, 2605-2638, 2647-2718, and 2735-8692), including the concatemeric peptides of SEQ ID NOS: 1677-1692, 2593-2604, 2639-2646, and 2719-2734)), excluding one or more of a peptide or polypeptide having an amino acid sequence comprising, consisting of, or consisting essentially of one or more of SEQ ID NOS: 1056-1057, 1059, 1367-1368, 1370, 1063, 1068, 101, 1374, 1379, 1382, 1073, 1075, 1083-1084, 1094, 1101, 1103, 1108, 1111, 1112, 1117, 1384, 1386, 1394-1395, 1405, 1412, 1414, 1419, 1422, 1423, 1428, 1125, 1436, 1131, 1133, 1134, 1442, 1444, 1445, 1141, 1452, 1142, 1145, 1453, 1456, 1152, 1157, 1159, 1164, 1463, 1468, 1470, 1475,1176, 1178, 1179, 1182, 1204, 1205, 1209, 1214, 1230, 1487, 1489 1490, 1493, 1499, 1515, 1516, 1520, 1525, 1541, 1237, 1245, 1251, 1253, 1548, 1556, 1562, 1564, 1260, 1264, 1266, 1274, 1571, 1575, 1577, 1585, 1275, 1276, 1586, 1587, 1278, 1589, 1284, 1286, 1595, 1597, 1292, 1301, 1303, 1603, 1612, 1614, 1316, 1321, 1329, 1330, 1627, 1632, 1640, 1641, 1340, 1651, 1350, 1352, 1661, 1663, 1358, 1361, 1364, 1669, 1672, and/or 1675)) are expected to elicit a strong effector immune recall response (such as production of effector cytokines, e.g., IFN-γ). In aspects, one or more of a peptide or polypeptide having an amino acid sequence comprising, consisting of, or consisting essentially of one or more of SEQ ID NOS: 1056-1057, 1059, 1367-1368, 1370, 1063, 1068, 101, 1374, 1379, 1382, 1073, 1075, 1083-1084, 1094, 1101, 1103, 1108, 1111, 1112, 1117, 1384, 1386, 1394-1395, 1405, 1412, 1414, 1419, 1422, 1423, 1428, 1125, 1436, 1131, 1133, 1134, 1442, 1444, 1445, 1141, 1452, 1142, 1145, 1453, 1456, 1152, 1157, 1159, 1164, 1463, 1468, 1470, 1475,1176, 1178, 1179, 1182, 1204, 1205, 1209, 1214, 1230, 1487, 1489 1490, 1493, 1499, 1515, 1516, 1520, 1525, 1541, 1237, 1245, 1251, 1253, 1548, 1556, 1562, 1564, 1260, 1264, 1266, 1274, 1571, 1575, 1577, 1585, 1275, 1276, 1586, 1587, 1278, 1589, 1284, 1286, 1595, 1597, 1292, 1301, 1303, 1603, 1612, 1614, 1316, 1321, 1329, 1330, 1627, 1632, 1640, 1641, 1340, 1651, 1350, 1352, 1661, 1663, 1358, 1361, 1364, 1669, 1672, and/or 1675 are not expected to elicit a strong effector immune recall response (such as production of effector cytokines, e.g., IFN-γ, but rather will produce a regulatory response (e.g., production of regulatory cytokines, e.g., IL-10).

[0433] As shown in FIG. 66A and FIG. 66B, polypeptides of the instant disclosure 4-1676, 1713-2595, 2605-2638, 2647-2718, and 2735-86924-1676, 1713-2595, 2605-2638, 2647-2718, and 2735-86921677-1692, 2593-2604, 2639-2646, and 2719-2734 stimulate higher IFN-γresponses in naïve and COVID-19 convalescent donors following expansion in culture. Response in naïve donors suggest such polypeptides of the instant disclosure expand low frequency cold coronavirus cross-reactive T cells. Further, differences between responses by pool in ex vivo and cultured assay may reflect variable phenotypes and/or proliferative capacities of epitope-specific T cells when they are put into culture. In aspects, a polypeptide of the instant disclosure (e.g., a peptide or polypeptide comprising, consisting, or consisting essentially of an amino acid sequence of SEQ ID NOS: 4-1676, 1713-2595, 2605-2638, 2647-2718, and 2735-8692 (and/or fragments or variants thereof), and optionally 1 to 12 additional amino acids distributed in any ratio on the N terminus and/or C-terminus of the polypeptide of SEQ ID NOS: 4-1676, 1713-2595, 2605-2638, 2647-2718, and 2735-8692), including the concatemeric peptides of SEQ ID NOS: 1677-1692, 2593-2604, 2639-2646, and 2719-2734)), excluding one or more of a peptide or polypeptide having an amino acid sequence comprising, consisting of, or consisting essentially of one or more of SEQ ID NOS: 1056-1057, 1059, 1367-1368, 1370, 1063, 1068, 101, 1374, 1379, 1382, 1073, 1075, 1083-1084, 1094, 1101, 1103, 1108, 1111, 1112, 1117, 1384, 1386, 1394-1395, 1405, 1412, 1414, 1419, 1422, 1423, 1428, 1125, 1436, 1131, 1133, 1134, 1442, 1444, 1445, 1141, 1452, 1142, 1145, 1453, 1456, 1152, 1157, 1159, 1164, 1463, 1468, 1470, 1475,1176, 1178, 1179, 1182, 1204, 1205, 1209, 1214, 1230, 1487, 1489 1490, 1493, 1499, 1515, 1516, 1520, 1525, 1541, 1237, 1245, 1251, 1253, 1548, 1556, 1562, 1564, 1260, 1264, 1266, 1274, 1571, 1575, 1577, 1585, 1275, 1276, 1586, 1587, 1278, 1589, 1284, 1286, 1595, 1597, 1292, 1301, 1303, 1603, 1612, 1614, 1316, 1321, 1329, 1330, 1627, 1632, 1640, 1641, 1340, 1651, 1350, 1352, 1661, 1663, 1358, 1361, 1364, 1669, 1672, and/or 1675)) are expected to elicit a strong effector immune recall response (such as production of effector cytokines, e.g., IFN-γ). In aspects, one or more of a peptide or polypeptide having an amino acid sequence comprising, consisting of, or consisting essentially of one or more of SEQ ID NOS: 1056-1057, 1059, 1367-1368, 1370, 1063, 1068, 101, 1374, 1379, 1382, 1073, 1075, 1083-1084, 1094, 1101, 1103, 1108, 1111, 1112, 1117, 1384, 1386, 1394-1395, 1405, 1412, 1414, 1419, 1422, 1423, 1428, 1125, 1436, 1131, 1133, 1134, 1442, 1444, 1445, 1141, 1452, 1142, 1145, 1453, 1456, 1152, 1157, 1159, 1164, 1463, 1468, 1470, 1475,1176, 1178, 1179, 1182, 1204, 1205, 1209, 1214, 1230, 1487, 1489 1490, 1493, 1499, 1515, 1516, 1520, 1525, 1541, 1237, 1245, 1251, 1253, 1548, 1556, 1562, 1564, 1260, 1264, 1266, 1274, 1571, 1575, 1577, 1585, 1275, 1276, 1586, 1587, 1278, 1589, 1284, 1286, 1595, 1597, 1292, 1301, 1303, 1603, 1612, 1614, 1316, 1321, 1329, 1330, 1627, 1632, 1640, 1641, 1340, 1651, 1350, 1352, 1661, 1663, 1358, 1361, 1364, 1669, 1672, and/or 1675 are not expected to elicit a strong effector immune recall response (such as production of effector cytokines, e.g., IFN-γ, but rather will produce a regulatory response (e.g., production of regulatory cytokines, e.g., IL-10).

[0434] As shown in FIG. 67A and FIG. 67B, polypeptides of the instant disclosure 4-1676, 1713-2595, 2605-2638, 2647-2718, and 2735-86924-1676, 1713-2595, 2605-2638, 2647-2718, and 2735-86921677-1692, 2593-2604, 2639-2646, and 2719-2734 stimulate low frequency epitope-specific T cells following expansion in culture in naive and COVID-19 convalescent donors. Differences between responses to spike and membrane peptides in ex vivo and cultured assay may reflect variable phenotypes and/or proliferative capacities of epitope-specific T cells when they are put into culture. In aspects, a polypeptide of the instant disclosure (e.g., a peptide or polypeptide comprising, consisting, or consisting essentially of an amino acid sequence of SEQ ID NOS: 4-1676, 1713-2595, 2605-2638, 2647-2718, and 2735-8692 (and/or fragments or variants thereof), and optionally 1 to 12 additional amino acids distributed in any ratio on the N terminus and/or C-terminus of the polypeptide of SEQ ID NOS: 4-1676, 1713-2595, 2605-2638, 2647-2718, and 2735-8692), including the concatemeric peptides of SEQ ID NOS: 1677-1692, 2593-2604, 2639-2646, and 2719-2734)), excluding one or more of a peptide or polypeptide having an amino acid sequence comprising, consisting of, or consisting essentially of one or more of SEQ ID NOS: 1056-1057, 1059, 1367-1368, 1370, 1063, 1068, 101, 1374, 1379, 1382, 1073, 1075, 1083-1084, 1094, 1101, 1103, 1108, 1111, 1112, 1117, 1384, 1386, 1394-1395, 1405, 1412, 1414, 1419, 1422, 1423, 1428, 1125, 1436, 1131, 1133, 1134, 1442, 1444, 1445, 1141, 1452, 1142, 1145, 1453, 1456, 1152, 1157, 1159, 1164, 1463, 1468, 1470, 1475,1176, 1178, 1179, 1182, 1204, 1205, 1209, 1214, 1230, 1487, 1489 1490, 1493, 1499, 1515, 1516, 1520, 1525, 1541, 1237, 1245, 1251, 1253, 1548, 1556, 1562, 1564, 1260, 1264, 1266, 1274, 1571, 1575, 1577, 1585, 1275, 1276, 1586, 1587, 1278, 1589, 1284, 1286, 1595, 1597, 1292, 1301, 1303, 1603, 1612, 1614, 1316, 1321, 1329, 1330, 1627, 1632, 1640, 1641, 1340, 1651, 1350, 1352, 1661, 1663, 1358, 1361, 1364, 1669, 1672, and/or 1675)) are expected to elicit a strong effector immune recall response (such as production of effector cytokines, e.g., IFN-γ). Again, in aspects, one or more of a peptide or polypeptide having an amino acid sequence comprising, consisting of, or consisting essentially of one or more of SEQ ID NOS: 1056-1057, 1059, 1367-1368, 1370, 1063, 1068, 101, 1374, 1379, 1382, 1073, 1075, 1083-1084, 1094, 1101, 1103, 1108, 1111, 1112, 1117, 1384, 1386, 1394-1395, 1405, 1412, 1414, 1419, 1422, 1423, 1428, 1125, 1436, 1131, 1133, 1134, 1442, 1444, 1445, 1141, 1452, 1142, 1145, 1453, 1456, 1152, 1157, 1159, 1164, 1463, 1468, 1470, 1475,1176, 1178, 1179, 1182, 1204, 1205, 1209, 1214, 1230, 1487, 1489 1490, 1493, 1499, 1515, 1516, 1520, 1525, 1541, 1237, 1245, 1251, 1253, 1548, 1556, 1562, 1564, 1260, 1264, 1266, 1274, 1571, 1575, 1577, 1585, 1275, 1276, 1586, 1587, 1278, 1589, 1284, 1286, 1595, 1597, 1292, 1301, 1303, 1603, 1612, 1614, 1316, 1321, 1329, 1330, 1627, 1632, 1640, 1641, 1340, 1651, 1350, 1352, 1661, 1663, 1358, 1361, 1364, 1669, 1672, and/or 1675 are not expected to elicit a strong effector immune recall response (such as production of effector cytokines, e.g., IFN-γ, but rather will produce a regulatory response (e.g., production of regulatory cytokines, e.g., IL-10).

[0435] As shown in FIG. 68, polypeptides of the instant disclosure 4-1676, 1713-2595, 2605-2638, 2647-2718, and 2735-86924-1676, 1713-2595, 2605-2638, 2647-2718, and 2735-86921677-1692, 2593-2604, 2639-2646, and 2719-2734stimulate low frequency epitope-specific T cells following expansion in culture in naïve and COVID-19 convalescent donors. Of 32 tested peptides, 27 testes peptides demonstrated positive responses, as shown in green, in at least one donor. Further, predicted spike epitope cross-conservation with common cold coronaviruses were confirmed in naïve donors. External data is shown from the preprint of Nelde et al. Research Square [preprint]: 2020 Jun. 17 doi: 10.21203/rs.3.rs-35331/v1.

[0436] As such, the data in FIG. 63A-FIG. 68 demonstrates that polypeptides of the instant disclosure 4-1676, 1713-2595, 2605-2638, 2647-2718, and 2735-86924-1676, 1713-2595, 2605-2638, 2647-2718, and 2735-86921677-1692, 2593-2604, 2639-2646, and 2719-2734are recognized by T cells raised in natural infection, stimulate Thl cytokine production, may stimulate pre-existing immunity to common cold coronaviruses, and memory may boost immunity in clinical trials. Again, in aspects, a polypeptide of the instant disclosure (e.g., a peptide or polypeptide comprising, consisting, or consisting essentially of an amino acid sequence of SEQ ID NOS: 4-1676, 1713-2595, 2605-2638, 2647-2718, and 2735-8692 (and/or fragments or variants thereof), and optionally 1 to 12 additional amino acids distributed in any ratio on the N terminus and/or C-terminus of the polypeptide of SEQ ID NOS: 4-1676, 1713-2595, 2605-2638, 2647-2718, and 2735-8692), including the concatemeric peptides of SEQ ID NOS: 1677-1692, 2593-2604, 2639-2646, and 2719-2734)), excluding one or more of a peptide or polypeptide having an amino acid sequence comprising, consisting of, or consisting essentially of one or more of SEQ ID NOS: 1056-1057, 1059, 1367-1368, 1370, 1063, 1068, 101, 1374, 1379, 1382, 1073, 1075, 1083-1084, 1094, 1101, 1103, 1108, 1111, 1112, 1117, 1384, 1386, 1394-1395, 1405, 1412, 1414, 1419, 1422, 1423, 1428, 1125, 1436, 1131, 1133, 1134, 1442, 1444, 1445, 1141, 1452, 1142, 1145, 1453, 1456, 1152, 1157, 1159, 1164, 1463, 1468, 1470, 1475,1176, 1178, 1179, 1182, 1204, 1205, 1209, 1214, 1230, 1487, 1489 1490, 1493, 1499, 1515, 1516, 1520, 1525, 1541, 1237, 1245, 1251, 1253, 1548, 1556, 1562, 1564, 1260, 1264, 1266, 1274, 1571, 1575, 1577, 1585, 1275, 1276, 1586, 1587, 1278, 1589, 1284, 1286, 1595, 1597, 1292, 1301, 1303, 1603, 1612, 1614, 1316, 1321, 1329, 1330, 1627, 1632, 1640, 1641, 1340, 1651, 1350, 1352, 1661, 1663, 1358, 1361, 1364, 1669, 1672, and/or 1675)) are expected to elicit a strong effector immune recall response (such as production of effector cytokines, e.g., IFN-γ). In aspects, one or more of a peptide or polypeptide having an amino acid sequence comprising, consisting of, or consisting essentially of one or more of SEQ ID NOS: 1056-1057, 1059, 1367-1368, 1370, 1063, 1068, 101, 1374, 1379, 1382, 1073, 1075, 1083-1084, 1094, 1101, 1103, 1108, 1111, 1112, 1117, 1384, 1386, 1394-1395, 1405, 1412, 1414, 1419, 1422, 1423, 1428, 1125, 1436, 1131, 1133, 1134, 1442, 1444, 1445, 1141, 1452, 1142, 1145, 1453, 1456, 1152, 1157, 1159, 1164, 1463, 1468, 1470, 1475,1176, 1178, 1179, 1182, 1204, 1205, 1209, 1214, 1230, 1487, 1489 1490, 1493, 1499, 1515, 1516, 1520, 1525, 1541, 1237, 1245, 1251, 1253, 1548, 1556, 1562, 1564, 1260, 1264, 1266, 1274, 1571, 1575, 1577, 1585, 1275, 1276, 1586, 1587, 1278, 1589, 1284, 1286, 1595, 1597, 1292, 1301, 1303, 1603, 1612, 1614, 1316, 1321, 1329, 1330, 1627, 1632, 1640, 1641, 1340, 1651, 1350, 1352, 1661, 1663, 1358, 1361, 1364, 1669, 1672, and/or 1675 are not expected to elicit a strong effector immune recall response (such as production of effector cytokines, e.g., IFN-γ, but rather will produce a regulatory response (e.g., production of regulatory cytokines, e.g., IL-10).

### Example 7—T cell epitope mapping in humans with and without SARS-CoV-2 experience: Identification of Candidate Epitopes for Rational COVID-19 vaccine design

### Materials and Methods

[0437] SARS-CoV-2 sequences. SARS-CoV-2 (taxid: 2697049), SARS-CoV-1 (taxid: 694009), MERS-CoV (taxid: 1335626), and human CoV (taxids: 11137, 443239, 277944 and 31631) antigen sequences isolated from human hosts were obtained from GenBank at the National Center for Biotechnology Information. SARS-CoV-2 epitopes were compared across sequences obtained from isolates with fully sequenced genomes isolated from December 2019 to December 2020. SARS-CoV-2 Wuhan-Hu-1 (GenBank id: MN908947) was selected as the reference strain.
[0438] T cell epitope mapping. Each antigen sequence was parsed into all possible linear 9-mer sequences. Each 9-mer was scored for likelihood of binding to panels of class I and class II HLA alleles using EpiMatrix version 1.3, a matrix-based algorithm for mapping T cell epitopes. Class II epitopes were identified for nine supertype alleles: DRB1*0101, DRB1*0301, DRB1*0401, DRB1*0701, DRB1*0801, DRB1*0901, DRB1*1101, DRB1*1301 and DRB1*1501. Class I epitope 9-mers (and 10-mers) were identified for potential binding to six supertype alleles: A*0101, A*0201, A*0301, A*2402, B*0702, B*4401. Each allele set covers >95% of the human population. (Southwood S, Sidney J, Kondo A, et al. Several common HLA-DR types share largely overlapping peptide binding repertoires. J Immunol. 1998;160(7):3363-337; and Sette A, Sidney J. Nine major HLA class I supertypes account for the vast preponderance of HLA-A and -B polymorphism. Immunogenetics. 1999;50(3-4):201-212, both incorporated by reference in their entireties). Promiscuous class II HLA epitopes representing regions of a protein with a high density of T cell immunogenicity potential were identified using the ClustiMer algorithm. Clusters scoring an overall EpiMatrix score >10 after subtracting the average expected sum of scores for a random sequence of equal length have significant immunogenicity potential (e.g., Moise et al. iVAX: An integrated toolkit for the selection and optimization of antigens and the design of epitope-driven vaccines. Human Vaccines & Immunotherapeutics 11:9, 2312-2321 (2015), herein incorporated by reference in its entirety.
[0439] T cell epitope homology analysis. The JanusMatrix algorithm (Moise L, Gutierrez A H, Bailey-Kellogg C, et al. The two-faced T cell epitope: Examining the host-microbe interface with JanusMatrix. Hum Vaccines Immunother. 2013 ; 9(7): 1577-1586. doi:10.4161/hv.24615, herein incorporated by reference in its entirety) was used to identify SARS-CoV-2 epitopes that share T cell receptor (TCR)-face conservation (positions 2, 3, 5, 7, and 8) with epitopes restricted by the same alleles, but found in the human proteome, and other (alpha- and beta-) coronavirus epitopes. Epitopes with identical TCR-facing residues, which are also predicted to bind to the same MHC allele, are more likely to induce cross-reactive T cells. A JanusMatrix score threshold of two (cross-conserved HLA-allele-specific epitopes averaged over the length of the sequence) for cross-conservation with human (self) proteins was applied to identify epitopes with elevated potential to be tolerated or actively regulatory. To investigate the conservation of SARS-CoV-2 epitopes with related highly pathogenic coronaviruses (SARS-CoV and MERS-CoV) and low pathogenicity common cold coronaviruses (CCCs; OC43, HKU1, NL62, and 229E), JanusMatrix was applied requiring identical TCR-facing residues at five positions and at positions 2 and 8 only. A separate homology analysis of iVAX-predicted SARS-CoV-2 T cell epitopes with published coronavirus epitopes deposited in the Immune Epitope Database was performed using BLAST and a cutoff of 80% similarity.
[0440] Peptide synthesis. Synthetic peptides were manufactured using 9-fluoronylmethoxycarbonyl (Fmoc) chemistry by 21^{st} Century Biochemicals (Marlboro, Mass.). Peptide purity was >90% as ascertained by analytical reversed phase HPLC. Peptide mass was confirmed by tandem mass spectrometry.
[0441] SARS-CoV-2 convalescent donors. Convalescent patients were recruited by Sanguine Biosciences, a clinical services group that identified, consented and enrolled participants. Inclusion criteria included subjects (i) willing and able to provide written informed consent, (ii) aged 18-80 years of age, both male or female, and (iii) PCR-confirmed COVID-19 diagnosis (recovered) with date of diagnosis a minimum of 30 days from blood collection. Exclusion criteria included subjects who (i) were pregnant or nursing, (ii) had a known history of HIV, hepatitis or other infectious diseases, (iii) had autoimmune diseases, (iv) were members of vulnerable patient population (prisoners, mentally impaired), (v) had medical conditions impacting their ability to donate blood (i.e. anemia, acute illness) (vi) had received immunosuppressive therapy or steroids within the last 6 months, (vii) had received an investigational product in the last 30 days, (viii) had experienced excess blood loss including blood donation defined as 250 mL in the last month or 500 mL in the last two months, or (ix) had a positive COVID-19 PCR test, but were asymptomatic. Samples were collected in accordance with NIH regulations and with the approval of an independent external institutional review board.
[0442] Healthy unexposed donors. Deidentified samples were obtained from leukocyte reduction filters from the Rhode Island Blood Center for unrelated studies prior to the SARS-CoV-2 outbreak in December 2019 (Date of samples: February 2016-November 2019). Samples were obtained in accordance with NIH regulations and with the approval of an independent external institutional review board (Ethical & Independent Review Services, Independence, Mo.).
[0443] PBMC culture. PBMCs from COVID-19 convalescents were put into culture directly following Ficoll separation. Cells from normal healthy donors were thawed and rested overnight before placing into culture. Samples were allocated for ex vivo assay and antigen-specific cell expansion followed by cultured assay. Antigen stimulated cells were cultured over eight days at 37° C. under a 5% CO₂ atmosphere. In a 48-well plate, 5×10⁶ cells in 150 μl RPMI medium supplemented with human AB serum were stimulated with pools of peptides at 10 μg/ml on Day 1. Three days later, IL-2 was added to 10 ng/ml and the culture volume raised to 300 μl. On Day 7, cells were supplemented with 10 ng/ml IL-2 by half media replacement. Two days later, PBMCs were collected and washed in preparation for measurement of immune recall responses.
[0444] Ex vivo and cultured human Fluorospot assay. Interferon-gamma (IFNγ) Fluorospot assays were performed using ex vivo and cultured PBMC using assay kits purchased from Mabtech and executed according to the manufacturer's specifications. For ex vivo assays, unless otherwise noted, peptides were added individually at 20 μg/ml or pooled at 10 μg/mL per peptide in triplicate wells containing 250,000 PBMCs in RPMI medium supplemented with 10% human AB serum. For cultured assays, peptides were added individually at 10 μg/ml or pooled at a total peptide concentration of 1 Oug/mL (32 peptides, 0.313 μg/mL) and added to triplicate wells containing 100,000 PBMCs. Triplicate wells were plated with ConA (5 μg/ml) as a positive control, and six wells containing no antigen stimulus (0.2-0.4% DMSO) were used for background determination. Cells were incubated for 40-48 hours at 37° C. under a 5% CO2 atmosphere. Plates were developed according to the manufacturer's directions using FITC-labeled anti-IFN-γ detection antibody. Raw spot counts were recorded by ZellNet Consulting, Inc. using a FluoroSpot reader system (iSpot Spectrum, AID, Strassberg, Germany) with software version 7.0, build 14790, where fluorescent spots were counted utilizing FITC and Cy3 filters. Camera exposure and gain settings were adapted for each filter to obtain high quality spot images preventing over- or underexposure. Fluorophore-specific spot parameters were defined using spot size, spot intensity and spot gradient (fading of staining intensity from center to periphery of spot), and a spot separation algorithm was applied for optimal spot detection.
[0445] Results were calculated as the average number of spots in the peptide wells, adjusted to spots per one million cells. Responses meeting the following criteria were considered to be positive when the number of spots was (i) at least five times background, (ii) greater than 25 spot forming cells per well above background (1 response per 40,000 PBMCs), and (iii) statistically different (p<0.05) from the media-only control by the Student's t test.
[0446] HLA typing. Donor HLA Class II types were determined using the One Lambda Micro SSPTM High Resolution HLA Class II kit at the Hartford Hospital Transplant Immunology Laboratory.
[0447] Mice. HLA-DR3 transgenic mice were obtained from Dr. Chella David (Mayo Clinic) under commercial license. The mice express the HLA-DRA and DRB1*0301 genes on a B.10-Ab⁰ mouse class II-negative background. Animal research protocols for mouse studies were reviewed and approved by the Absorption Systems Inc. Institutional Animal Care and Use Committee.
[0448] Peptide vaccine preparation. Per dose, a pool of 20 peptides at 1.25 or 5.0 μg/peptide was admixed with 50 μg poly-ICLC (Hiltonol™; Oncovir) in 50 μL.
[0449] Vaccinations. Vaccine- and sham-treated HLA-DR3 mice (N=5/group) were female and 6-8 weeks old at the start of immunizations. Mice were primed and boosted two weeks later by intradermal immunization with peptide/poly-ICLC vaccine. Control groups received sterile water (N=3) or poly-ICLC alone (N=5). Mice were sacrificed nine days after the boost immunization. Blood at baseline and termination and spleens were harvested for immune monitoring. One mouse in the group that received 5μg/peptide was excluded following splenocyte isolation due to insufficient recovery and poor viability for reasons thought to be unrelated to vaccination.
[0450] Ex vivo FluoroSpot assay in mouse splenocytes. The frequency of vaccine-specific splenocytes was determined by dual cytokine IFNγ/IL-4 FluoroSpot assay using the Mabtech mouse IFNγ/IL-4 FluoroSpot Kit with pre-coated plates according to the manufacturer's protocol. Washed splenocytes in RPMI 1640 (Gibco) supplemented with 10% fetal calf serum (FCS, Atlanta Biologicals) were added at 250,000 cells per well. Antigen stimulations included pools of all 20 vaccine peptides, as well as spike-derived vaccine peptides, and membrane-derived vaccine peptides. Peptide pools were added at 0.5 μg/ml per peptide. Triplicate wells were stimulated with 2 μg/ml Concanavalin A (ConA; Sigma Aldrich) as a positive control, and six replicate wells with medium containing 0.2% DMSO were used for background determination. Raw spot counts were recorded by ZellNet Consulting, Inc. and results were calculated as described above for human FluoroSpot assays. Flow cytometry in mouse splenocytes. Splenocytes were plated at 300,000 cells per well and stimulated in triplicate over six hours with a pool of all 20 vaccine peptides at 0.5 μg/mL per peptide and 4μg/mL co-stimulatory anti-CD28 antibody. Triplicate wells were stimulated with PMA (50 ng/mL)+ionomycin (1 μg/mL) as a positive control. For background determinations, triplicate wells were treated with medium containing 0.2% DMSO only and medium containing 0.2% DMSO and 4μg/mL co-stimulatory anti-CD28 antibody. Brefeldin A (5 ng/μL) and 2μM monensin were added with stimulations to enable detection of intracellular cytokines. Following stimulation, cells were incubated with fixable viability stain 450 to discriminate dead from live cells, and then stained with the following surface marker antibody panel: CD3e-AF700 (clone 500A2), CD4-APC/Fire750 (clone GK1.5), CD8a-FITC (clone 53-6.7), CD62L-APC (clone MEL-14) (BioLegend), CD44-eFLuor506 (clone IM7) (Thermo). To detect intracellular cytokine expression, cells were fixed and permeabilized and immunostained using IFNO -BV605 (clone XMG1.2), IL-4-PerCP/Cy5.5 (clone 11B11) and IL-5-PE (clone TRFKS) (BioLegend) antibodies. Flow cytometry measurements were made on an Invitrogen Attune cytometer and collected data analyzed using FlowJo software (Version 10.6.2). Cells were gated on lymphocyte/singlet/live events. Recalled Thl and Th2 cells were defined, respectively, as IFNγ-producing CD3⁺CD4⁺ CD44⁺ T cells and IL-4- and/or IL-5-producing CD3⁺CD4⁺ CD44⁺ T cells. Tc1 and Tc2 cells were defined, respectively, as IFNγ-producing CD3⁺CD8⁺ CD44⁺ T cells and IL-4- and/or IL-5-producing CD3⁺CD8⁺ CD44⁺ T cells.

### Results

### In Silico Prediction of SARS-CoV-2 T Cell Targets

[0451] To identify SARS-CoV-2 sequences recognized by T cells capable of inducing protective responses in natural infection, we analyzed the T cell immunogenicity potential of the SARS-CoV-2 surface antigens, spike, membrane and envelope, using immunoinformatic tools. As a group, these antigens are structural proteins, potential antibody targets, and estimated to be produced at higher abundance than other antigens in infected cells. Initially, we predicted CD4+ T cell immunogenicity potential using the EpiMatrix T cell epitope mapping algorithm and the Wuhan-Hu-1 strain as a reference sequence. Predictions were made using nine HLA class II and six HLA class I supertype alleles representing >95% of the human population. For each antigen, we identified regions of high class II HLA epitope density, called clusters, across multiple supertype alleles. A total of 52 epitope clusters containing between 6 and 60 binding motifs each were identified (Table 57). These epitope clusters contain more than 100 total individual binding motifs for each of the nine supertype alleles, ranging from 109 for DRB1*0301 to 180 for DRB1*0901.

The CD8⁺ T cell immunogenicity potential of these clusters was evaluated and showed that multiple putative class I HLA epitopes overlap in regions of high class II HLA epitope density (Table 57). These epitope clusters are therefore expected to recall both CD4⁺ and CD8⁺ T cell responses in individuals with SARS-CoV-2 history and may stimulate both CD4⁺ and CD8⁺ T cell immunity in a T cell-directed vaccine. We also investigated the conservation of these clusters in other SARS-CoV-2 isolates and determined that the clusters are identical to clusters found in >98.38% of strains isolated between January and September 2020 (Table 57). Highly conserved peptides such as these are useful for vaccines and as reagents for assays that interrogate T cell responses using samples from natural infection and immunization.

[0452] HLA class II ligands may stimulate effector or regulatory CD4⁺ T cells leading to divergent immunological outcomes. HLA binding predictions do not distinguish between these possibilities. They account for peptide interactions with the HLA binding groove and overlook potential interactions with the T cell receptor (TCR).

[0453] As the T cell repertoire is shaped by training on human T cell epitopes, we routinely assess potential for regulatory T cell induction by screening the TCR-face of epitopes for homology with self antigens using the JanusMatrix algorithm. For each cluster, the average depth of coverage in the human proteome was calculated holding all TCR-facing positions fixed and allowing HLA-facing positions to vary while requiring human sequences to bind to the same HLA alleles as the SARS-CoV-2 sequences. JanusMatrix analysis revealed that each SARS-COV-2 protein contains clusters with significant human homology scores (>2). This was also true for some of the 52 selected clusters. 17 (32.7%) were found to have elevated regulatory T cell induction potential based on high JanusMatrix homology with the human proteome, and in contrast, 35 (67.3%) were considered more likely to induce effector T cell responses. The results suggest that different CD4+ T cell subsets may be activated by these epitopes in the course of SARS-CoV-2 infection and measurement of recall responses in vitro.

[0454] We designed 32 peptides for synthesis by manually editing clusters to center effector epitopes and remove epitopes with significant human homology. We used these 32 peptides to probe T cell recognition of the putative effector T cell epitopes. The peptides included one envelope sequence, eight sourced from membrane, and 23 from spike (Table 58A and Table 58B). Spike peptides comprise 14 in the 51 domain, including five RBD sequences, and nine in the S2 domain.

TABLE 57
Immunogenicity potential and human and coronavirus cross-conservation
features of SARS-CoV-2 surface antigen epitope clusters

| | | | | | | Janus | | |
|---|---|---|---|---|---|---|---|---|
| Antigen/ | SEQ | | EpiMatrix | EpiMatrix | EpiMatrix | Human | IEDB | SARS- |
| Cluster | ID | Cluster | Hits | Hits | Cluster | Homology | Corona | CoV-2 |
| Address | NO: | Sequence | Class I^{a} | Class II^{b} | Score^{c} | Score^{d} | virus^{e} | Conserv.^{f} |
| ENVELOPE/ | 4 | MYSFVSEETGTLI | 25 | 23 | 36.95 | 3.03 | 1 | 98.97% |
| 1-25 | | VNSVLLFLAFVV | | | | | | |
| ENVELOPE/ | 22 | VNSVLLFLAFVVFL | 44 | 60 | 110.24 | 3.78 | 0 | 99.81% |
| 14-44 | | LVTLAILTALRLCA | | | | | | |
| | | YCC | | | | | | |
| ENVELOPE/ | 46 | IVNVSLVKPSFYVY | 20 | 37 | 63.92 | 1.15 | 0 | 99.40% |
| 46-75 | | SRVKNLNSSRVPD | | | | | | |
| | | LLV | | | | | | |
| MEMBRANE/ | 69 | LKKLLEQWNLVIGF | 22 | 8 | 13.01 | 9.00 | 1 | 99.54% |
| 13-31 | | LFLTW | | | | | | |
| MEMBRANE/ | 81 | GFLFLTWICLLQFA | 28 | 18 | 28.42 | 16.00 | 0 | 99.82% |
| 25-48 | | YANRNRFLYI | | | | | | |
| MEMBRANE/ | 98 | RNRFLYIIKLIFLWL | 41 | 24 | 39.94 | 22.00 | 3 | 99.84% |
| 42-66 | | LWPVTLACFV | | | | | | |
| MEMBRANE/ | 116 | LWPVTLACFVLAA | 13 | 12 | 20.32 | 9.00 | 1 | 99.65% |
| 57-76 | | VYRINWI | | | | | | |
| MEMBRANE/ | 129 | LVGLMWLSYFIASF | 37 | 34 | 58.30 | 16.00 | 0 | 99.76% |
| 87-14 | | RLFARTRSMWSF | | | | | | |
| | | NP | | | | | | |
| MEMBRANE/ | 150 | MWSFNPETNILLN | 10 | 15 | 26.00 | 11.00 | 0 | 99.79% |
| 109-129 | | VPLHGTIL | | | | | | |
| MEMBRANE/ | 164 | IGAVILRGHLRIAG | 4 | 12 | 18.30 | 21.00 | 0 | 99.87% |
| 140-160 | | HHLGRCD | | | | | | |
| MEMBRANE/ | 178 | PKEITVATSRTLSY | 13 | 7 | 11.79 | 1.00 | 2 | 99.79% |
| 165-181 | | YKL | | | | | | |
| MEMBRANE/ | 188 | TLSYYKLGASQRV | 4 | 11 | 19.56 | 8.00 | 2 | 99.78% |
| 175-192 | | AGDSG | | | | | | |
| MEMBRANE/ | 199 | YSRYRIGNYKLNT | 13 | 11 | 15.31 | 10.0 | 0 | 99.69% |
| 196-217 | | DHSSSSDNI | | | | | | |
| SPIKE/ | 210 | MFVFLVLLPLVSS | 13 | 41 | 71.61 | 3.19 | 0 | 98.38% |
| 1-26 | | QCVNLTTRTQLPP | | | | | | |
| SPIKE/ | 229 | PPAYTNSFTRGVY | 10 | 6 | 12.80 | 0.17 | 0 | 99.64% |
| 25-39 | | YP | | | | | | |
| SPIKE/ | 237 | PDKVFRSSVLHST | 14 | 15 | 23.82 | 1.94 | 0 | 98.77% |
| 39-59 | | QDLFLPFF | | | | | | |
| SPIKE/ | 251 | QDLFLPFFSNVTW | 18 | 9 | 16.27 | 0.22 | 1 | 98.91% |
| 52-69 | | FHAIH | | | | | | |
| SPIKE/ | 262 | NVTWFHAIHVSGT | 7 | 12 | 21.41 | 0.54 | 0 | 99.43% |
| 61-79 | | NGTKRF | | | | | | |
| SPIKE/ | 274 | NDGVYFASTEKS | 6 | 7 | 10.83 | 0.29 | 0 | 99.64% |
| 87-103 | | NIIRG | | | | | | |
| SPIKE/ | 284 | KTQSLLIVNNATN | 5 | 23 | 40.90 | 0.52 | 0 | 99.85% |
| 113-131 | | VVIKVC | | | | | | |
| SPIKE/ | 296 | NDPFLGVYYHKN | 8 | 14 | 23.78 | 0.00 | 0 | 98.88% |
| 137-156 | | NKSWMESE | | | | | | |
| SPIKE/ | 309 | ESEFRVYSSANN | 17 | 11 | 18.25 | 0.09 | 0 | 99.78% |
| 154-171 | | CTFEYV | | | | | | |
| SPIKE/ | 320 | IDGYFKIYSKHTP | 10 | 12 | 22.25 | 0.21 | 0 | 99.50% |
| 197-215 | | INLVRD | | | | | | |
| SPIKE/ | 332 | HTPINLVRDLPQ | 3 | 8 | 14.08 | 4.25 | 0 | 99.26% |
| 207-223 | | GFSAL | | | | | | |
| SPIKE/ | 342 | GINITRFQTLLAL | 16 | 30 | 55.01 | 1.03 | 0 | 99.31% |
| 232-255 | | HRSYLTPGDSS | | | | | | |
| SPIKE/ | 359 | YVGYLQPRTFLL | 12 | 16 | 23.08 | 0.84 | 0 | 98.50% |
| 266-288 | | KYNENGTITDA | | | | | | |
| SPIKE/ | 375 | EKGIYQTSNFRV | 7 | 10 | 13.16 | 0.00 | 1 | 98.78% |
| 309-329 | | QPTESIVRF | | | | | | |
| SPIKE/ | 389 | LCPFGEVFNATR | 7 | 8 | 10.23 | 0.38 | 0 | 99.76% |
| 335-353 | | FASVYAW | | | | | | |
| SPIKE/ | 401 | FASVYAWNRKR | 5 | 7 | 11.13 | 0.63 | 0 | 99.88% |
| 347-364 | | ISNCVAD | | | | | | |
| SPIKE/ | 412 | VADYSVLYNSAS | 19 | 20 | 36.57 | 0.95 | 0 | 99.83% |
| 362-380 | | FSTFKCY | | | | | | |
| SPIKE/ | 424 | DSKVGGNYNYLY | 20 | 33 | 58.42 | 1.03 | 0 | 99.13% |
| 442-468 | | RLFRKSNLKPFER | | | | | | |
| | | DI | | | | | | |
| SPIKE | 444 | VEGFNCYFPLQS | 10 | 11 | 17.96 | 0.00 | 0 | 99.34% |
| 483-500 | | YGFQPT | | | | | | |
| SPIKE/ | 455 | LQSYGFQPTNGV | 3 | 7 | 10.08 | 0.14 | 0 | 99.33% |
| 492-508 | | GYQPY | | | | | | |
| SPIKE/ | 465 | YRVVVLSFELLHA | 12 | 15 | 24.27 | 3.35 | 3 | 98.85% |
| 508-529 | | PATVCGPKK | | | | | | |
| SPIKE/ | 480 | NKCVNFNFNGLT | 2 | 12 | 18.82 | 0.00 | 2 | 99.79% |
| 536-554 | | GTGVLTE | | | | | | |
| SPIKE/ | 492 | PTNFTISVTTEILPV | 8 | 6 | 12.63 | 0.00 | 1 | 99.91% |
| 715-729 | | | | | | | | |
| SPIKE/ | 500 | CSNLLLQYGSFCT | 13 | 21 | 30.52 | 0.64 | 1 | 99.76% |
| 749-774 | | QLNRALTGIAVEQ | | | | | | |
| SPIKE/ | 519 | FGGFNFSQILPDP | 4 | 8 | 10.25 | 0.13 | 1 | 99.68% |
| 797-816 | | SKPSKRS | | | | | | |
| SPIKE | 532 | IEDLLFNKVTLAD | 7 | 12 | 18.64 | 1.69 | 2 | 99.81% |
| 818-837 | | AGFIKQY | | | | | | |
| SPIKE/ | 545 | AQKFNGLTVLPP | 4 | 10 | 15.82 | 1.64 | 3 | 99.70% |
| 852-869 | | LLTDEM | | | | | | |
| SPIKE/ | 556 | TDEMIAQYTSALL | 11 | 13 | 21.49 | 1.00 | 0 | 99.86% |
| 866-884 | | AGTITS | | | | | | |
| SPIKE/ | 568 | QIPFAMQMAYRF | 15 | 7 | 10.20 | 0.00 | 3 | 99.88% |
| 895-911 | | NGIGV | | | | | | |
| SPIKE/ | 578 | NQKLIANQFNSAI | 12 | 18 | 24.88 | 1.35 | 0 | 99.36% |
| 919-945 | | GKIQDSLSSTASAL | | | | | | |
| SPIKE/ | 598 | IQDSLSSTASALG | 6 | 7 | 11.21 | 3.11 | 1 | 99.56% |
| 934-949 | | KLQ | | | | | | |
| SPIKE/ | 607 | AQALNTLVKQLSS | 14 | 30 | 52.49 | 1.50 | 2 | 99.87% |
| 956-981 | | NFGAISSVLNDIL | | | | | | |
| SPIKE/ | 626 | EVQIDRLITGRLQ | 8 | 12 | 16.19 | 0.29 | 2 | 99.79% |
| 990-1012 | | SLQTYVTQQL | | | | | | |
| SPIKE/ | 642 | QQLIRAAEIRASA | 7 | 14 | 25.75 | 2.73 | 2 | 99.95% |
| 1010-1029 | | NLAATKM | | | | | | |
| SPIKE/ | 655 | GKGYHLMSFPQS | 9 | 8 | 11.27 | 0.50 | 3 | 99.91% |
| 1044-1063 | | APHGWFL | | | | | | |
| SPIKE/ | 668 | CDVVIGIVNNTVY | 5 | 9 | 16.52 | 0.44 | 3 | 99.45% |
| 1126-1141 | | DPL | | | | | | |
| SPIKE/ | 677 | LDKYFKNHTSPD | 3 | 7 | 12.63 | 0.00 | 2 | 99.82% |
| 1152-1167 | | VDLG | | | | | | |
| SPIKE/ | 686 | LGDISGINASVVN | 5 | 9 | 15.12 | 1.00 | 2 | 99.87% |
| 1166-1183 | | IQKEI | | | | | | |
| SPIKE/ | 697 | WYIWLGFIAGLIA | 13 | 11 | 18.34 | 2.42 | 2 | 99.67% |
| 1214-1231 | | IVMVT | | | | | | |

^{a}Number of Class I epitope 9-mers and 10-mers ic entified for potential binding to six supertype alleles.
^{b}Number of Class I epitope 9-mers identified for potential binding to nine supertype alleles.
^{c}T cell immunogenicity potential considering deviation in predicted T cell epitope content from random expectation. T cell epitope clusters scoring above 10 are considered potentiallyimmunogenic.
^{d}Average depth of coverage within the human proteome for the HLA binding peptides contained within the T cell epitope cluster.
^{e}Number of coronavirus T cell epitopes in IEDB with more than 80% similarity to T cell epitope clusters.
^{f}Percentage of strains isolated between January and December 2020 (n = 16450) that contain identical epitope clusters

TABLE 58A
Coronavirus cross-conservation features of effector T cell
epitope peptides screened in immunoassays

| | | | Scaled Class II | | | | | | |
|---|---|---|---|---|---|---|---|---|---|
| | SEQ | | Janus CoV Homology Score^{a} | | | | | | |
| Input | ID | Cluster | SARS- | SARS- | MERS- | hCoV- | hCoV- | hCoV- | hCoV- |
| Sequence | NO: | Sequence | CoV-2 | CoV-1 | CoV | HKU1 | OC43 | NL63 | 229E |
| ENVELOPE | 1055 | MYSFVSEETGTLIVN | 1.00 | 1.00 | 0.00 | 0.00 | 0.00 | 0.00 | 0.00 |
| MEMBRANE | 1060 | LKKLLEQWNLVIGFL | 1.00 | 1.09 | 0.00 | 0.00 | 0.00 | 0.00 | 0.00 |
| MEMBRANE | 1118 | ICLLQFAYANRNRFLYI | 1.00 | 0.89 | 0.00 | 0.00 | 0.00 | 0.00 | 0.00 |
| MEMBRANE | 1065 | LSYFIASFRLFARTR | 1.00 | 0.22 | 0.00 | 0.00 | 0.00 | 0.00 | 0.00 |
| MEMBRANE | 1066 | IASFRLFARTRSMWSFN | 1.00 | 1.02 | 0.00 | 0.00 | 0.00 | 0.00 | 0.00 |
| MEMBRANE | 1119 | RGHLRIAGHHLGRCD | 1.00 | 0.09 | 0.00 | 0.00 | 0.00 | 0.00 | 0.00 |
| MEMBRANE | 1070 | PKEITVATSRTLSYY | 1.00 | 0.73 | 0.00 | 0.00 | 0.00 | 0.00 | 0.00 |
| MEMBRANE | 1071 | TLSYYKLGASQRVAGD | 1.00 | 0.92 | 0.00 | 0.00 | 0.00 | 0.00 | 0.00 |
| MEMBRANE | 1072 | IGNYKLNTDHSSSSDNI | 1.00 | 0.20 | 0.00 | 0.00 | 0.00 | 0.00 | 0.00 |
| SPIKE | 1074 | PPAYTNSFTRGVYY | 0.97 | 0.00 | 0.00 | 0.00 | 0.00 | 0.00 | 0.00 |
| SPIKE | 1120 | NDGVYFASTEKSNIIR | 1.00 | 0.26 | 0.00 | 0.00 | 0.00 | 0.00 | 0.00 |
| SPIKE | 1080 | FLGVYYHKNNKSWMESE | 1.00 | 0.00 | 0.00 | 0.00 | 0.00 | 0.00 | 0.00 |
| SPIKE | 1081 | ESEFRVYSSANNCTFEYV | 1.00 | 0.00 | 0.00 | 0.00 | 0.00 | 0.00 | 0.00 |
| SPIKE | 1082 | DGYFKIYSKHTPINL | 1.00 | 0.00 | 0.00 | 0.00 | 0.00 | 0.00 | 0.00 |
| SPIKE | 1085 | QTLLALHRSYLTPGDSS | 0.98 | 0.00 | 0.00 | 0.00 | 0.00 | 0.00 | 0.00 |
| SPIKE | 1086 | PRTFLLKYNENGTITDA | 1.00 | 0.14 | 0.00 | 0.00 | 0.00 | 0.00 | 0.00 |
| SPIKE | 1087 | TSNFRVQPTESIVRF | 1.00 | 0.00 | 0.00 | 0.00 | 0.00 | 0.00 | 0.00 |
| SPIKE | 1088 | FGEVFNATRFASVYA | 1.00 | 0.11 | 0.00 | 0.00 | 0.00 | 0.00 | 0.00 |
| SPIKE | 1089 | FASVYAWNRKRISNCVAD | 1.00 | 0.11 | 0.00 | 0.00 | 0.00 | 0.00 | 0.00 |
| SPIKE | 1091 | GGNYNYLYRLFRKSNLKP | 1.00 | 0.00 | 0.00 | 0.00 | 0.00 | 0.00 | 0.00 |
| | | FERDI | | | | | | | |
| SPIKE | 1092 | VEGFNCYFPLQSYGFQPT | 1.00 | 0.00 | 0.00 | 0.00 | 0.00 | 0.00 | 0.00 |
| SPIKE | 1093 | LQSYGFQPTNGVGYQPY | 1.00 | 0.00 | 0.00 | 0.00 | 0.00 | 0.00 | 0.00 |
| SPIKE | 1122 | NKCVNFNFNGLTGT | 1.00 | 0.92 | 0.00 | 0.00 | 0.00 | 0.00 | 0.00 |
| SPIKE | 1100 | FGGFNFSQILPDPSKPSKRS | 1.00 | 0.46 | 0.00 | 0.00 | 0.00 | 0.00 | 0.00 |
| SPIKE | 1104 | TDEMIAQYTSALLA | 1.00 | 0.00 | 0.00 | 0.00 | 0.00 | 0.00 | 0.00 |
| SPIKE | 1123 | QIPFAMQMAYRFNGIGV | 1.00 | 0.92 | 0.00 | 0.00 | 0.00 | 0.00 | 0.00 |
| SPIKE | 1106 | QKLIANQFNSAIGKI | 1.00 | 0.00 | 0.00 | 0.00 | 0.00 | 0.00 | 0.00 |
| SPIKE | 1107 | ANQFNSAIGKIQDSL | 1.00 | 0.00 | 0.00 | 0.00 | 0.00 | 0.00 | 0.00 |
| SPIKE | 1108 | TGRLQSLQTYVTQQL | 1.00 | 0.92 | 0.00 | 0.00 | 0.00 | 0.00 | 0.00 |
| SPIKE | 1113 | GKGYHLMSFPQSAPH | 1.00 | 0.46 | 0.00 | 0.00 | 0.00 | 0.00 | 0.00 |
| SPIKE | 1115 | LDKYFKNHTSPDVDL | 1.00 | 0.92 | 0.00 | 0.00 | 0.00 | 0.00 | 0.00 |
| SPIKE | 1116 | ISGINASVVNIQKEI | 1.00 | 0.92 | 0.00 | 0.00 | 0.00 | 0.00 | 0.00 |

TABLE 58B
Coronavirus cross-conservation features of effector T cell
epitope peptides screened in immunoassays

| | | | Scaled Class II | | | | | | |
|---|---|---|---|---|---|---|---|---|---|
| | SEQ | | Janus CoV TCRf 5,8 Homology Score^{b} | | | | | | |
| Input | ID | Cluster | SARS- | SARS- | MERS- | hCoV- | hCoV- | hCoV- | hCoV- |
| Sequence | NO: | Sequence | CoV-2 | CoV-1 | CoV | HKU1 | OC43 | NL63 | 229E |
| ENVELOPE | 1055 | MYSFVSEETGTLIVN | 1.00 | 1.00 | 0.00 | 0.00 | 0.00 | 0.00 | 0.00 |
| MEMBRANE | 1060 | LKKLLEQWNLVIGFL | 1.00 | 1.09 | 0.00 | 0.00 | 0.00 | 0.20 | 0.80 |
| MEMBRANE | 1118 | ICLLQFAYANRNRFLYI | 1.00 | 1.09 | 0.20 | 0.47 | 0.34 | 0.13 | 0.27 |
| MEMBRANE | 1065 | LSYFIASFRLFARTR | 1.19 | 0.97 | 0.25 | 0.87 | 0.26 | 0.18 | 0.44 |
| MEMBRANE | 1066 | IASFRLFARTRSMWSFN | 2.00 | 1.99 | 0.00 | 0.00 | 0.00 | 0.00 | 0.27 |
| MEMBRANE | 1119 | RGHLRIAGHHLGRCD | 1.00 | 0.95 | 0.00 | 0.29 | 0.00 | 0.00 | 0.14 |
| MEMBRANE | 1070 | PKEITVATSRTLSYY | 0.43 | 0.36 | 0.00 | 0.43 | 0.00 | 0.29 | 0.29 |
| MEMBRANE | 1071 | TLSYYKLGASQRVAGD | 2.00 | 1.92 | 0.00 | 0.00 | 0.00 | 0.00 | 0.00 |
| MEMBRANE | 1072 | IGNYKLNTDHSSSSDNI | 1.00 | 0.20 | 0.00 | 0.11 | 0.03 | 0.00 | 0.00 |
| SPIKE | 1074 | PPAYTNSFTRGVYY | 0.97 | 0.00 | 0.17 | 0.83 | 0.67 | 0.00 | 0.00 |
| SPIKE | 1120 | NDGVYFASTEKSNIIR | 1.14 | 0.39 | 0.00 | 1.12 | 0.71 | 1.14 | 0.57 |
| SPIKE | 1080 | FLGVYYHKNNKSWMESE | 1.00 | 0.13 | 0.36 | 0.65 | 0.57 | 0.58 | 0.57 |
| SPIKE | 1081 | ESEFRVYSSANNCTFEYV | 1.18 | 0.33 | 0.18 | 0.53 | 0.38 | 0.70 | 0.36 |
| SPIKE | 1082 | DGYFKIYSKHTPINL | 1.08 | 0.08 | 0.25 | 0.02 | 0.00 | 0.08 | 0.08 |
| SPIKE | 1085 | QTLLALHRSYLTPGDSS | 1.39 | 0.43 | 0.13 | 0.28 | 0.13 | 0.21 | 0.20 |
| SPIKE | 1086 | PRTFLLKYNENGTITDA | 1.31 | 0.49 | 0.16 | 0.53 | 0.75 | 0.61 | 0.38 |
| SPIKE | 1087 | TSNFRVQPTESIVRF | 1.50 | 0.15 | 1.16 | 0.19 | 0.00 | 0.00 | 0.07 |
| SPIKE | 1088 | FGEVFNATRFASVYA | 1.00 | 0.46 | 0.62 | 0.81 | 0.49 | 0.25 | 0.13 |
| SPIKE | 1089 | FASVYAWNRKRISNCVAD | 1.25 | 0.23 | 0.25 | 0.27 | 0.13 | 0.39 | 0.13 |
| SPIKE | 1091 | GGNYNYLYRLFRKSNLKPF | 1.19 | 0.21 | 0.26 | 0.38 | 0.19 | 0.30 | 0.53 |
| | | ERDI | | | | | | | |
| SPIKE | 1092 | VEGFNCYFPLQSYGFQPT | 1.00 | 0.08 | 0.36 | 0.10 | 0.18 | 0.26 | 0.00 |
| SPIKE | 1093 | LQSYGFQPTNGVGYQPY | 1.14 | 0.13 | 0.44 | 0.12 | 0.13 | 0.43 | 0.29 |
| SPIKE | 1122 | NKCVNFNFNGLTGT | 1.57 | 1.57 | 0.15 | 0.06 | 0.01 | 0.57 | 0.57 |
| SPIKE | 1100 | FGGFNFSQILPDPSKPSKRS | 1.00 | 0.46 | 0.88 | 0.52 | 0.13 | 1.47 | 0.38 |
| SPIKE | 1104 | TDEMIAQYTSALLA | 1.40 | 0.92 | 0.21 | 0.29 | 0.23 | 1.00 | 0.89 |
| SPIKE | 1123 | QIPFAMQMAYRFNGIGV | 1.25 | 0.92 | 0.00 | 0.14 | 0.24 | 0.13 | 0.00 |
| SPIKE | 1106 | QKLIANQFNSAIGKI | 1.00 | 0.79 | 0.14 | 0.58 | 0.57 | 0.29 | 0.71 |
| SPIKE | 1107 | ANQFNSAIGKIQDSL | 1.00 | 0.92 | 0.14 | 0.26 | 0.00 | 1.30 | 0.57 |
| SPIKE | 1108 | TGRLQSLQTYVTQQL | 1.14 | 0.92 | 1.28 | 0.14 | 1.29 | 0.86 | 0.71 |
| SPIKE | 1113 | GKGYHLMSFPQSAPH | 1.00 | 0.76 | 0.00 | 0.30 | 0.67 | 0.01 | 0.70 |
| SPIKE | 1115 | LDKYFKNHTSPDVDL | 1.33 | 1.02 | 0.00 | 0.33 | 0.12 | 0.45 | 0.00 |
| SPIKE | 1116 | ISGINASWNIQKEI | 1.11 | 1.02 | 0.22 | 0.43 | 0.22 | 0.53 | 0.67 |

SARS-CoV-2 Epitope Conservation with Related Coronaviruses at the TCR-Face

[0455] We also investigated the conservation of the selected peptides with related coronaviruses that infect humans including highly pathogenic SARS-CoV and MERS-CoV and low pathogenicity common cold coronaviruses (CCCs) OC43, HKU1, NL63, and 229E. Prior exposure to these viruses may have established T cell memory that can be recalled upon SARS-CoV-2 infection and vaccination. As well, SARS-CoV-2 infection and vaccination establishes T cell memory that can influence responses in future infections to these viruses or yet-to-emerge coronaviruses. To identify potentially cross-reactive sequences, we screened the TCR-face of SARS-CoV-2 epitopes for homology with coronaviruses that infect humans, using the JanusMatrix algorithm (Table 58A and Table 58B). All of the membrane and envelope sequences shared identical TCR-face patterns with SARS-CoV. Half the spike clusters were unique to SARS-CoV-2 and the other half are conserved with SARS-CoV. Only three clusters were cross-conserved outside SARS viruses. Given reports of pre-existing T cell immunity in people with no SARS-CoV-2 experience, we relaxed the requirement for 100% identity at every TCR-face position. Fixing two positions shown to be extensively involved in TCR interactions (positions 5 and 8), JanusMatrix predicted an expanded cross-conservation landscape for SARS-CoV-2 spike and membrane clusters. Most spike clusters were conserved, by these criteria, in the subset of coronaviruses that infect humans. The remainder of the sequences with cross-reactivity potential are cross-conserved among highly pathogenic beta-coronaviruses or among high and low pathogenicity beta-coronaviruses. Only three clusters were unique to SARS-CoV-2 by the cristeria described above, and none are solely conserved with SARS-CoV. The single membrane clusters was cross-conserved in the highly pathogenic beta-coronaviruses and coronaviruses that infect humans subsets.

[0456] As the vast majority of people were not exposed to SARS-CoV and MERS-CoV, we also explored cross-conservation between SARS-CoV-2 and CCCs only. Of the 32 peptides, only 2 are SARS-CoV-2-specific. Eighteen clusters (56.6%) are cross-conserved across OC43, HKU1, NL63, and 229E and 12 (37.5%) are cross-conserved in at least one of these four CCCs.

### Clinical Cohort

[0457] Persons with and without SARS-CoV-2 infection history were selected to provide PBMC samples for validation of predicted T cell epitopes. COVID-19 convalescents with PCR-confirmed SARS-CoV-2 infection (N=15) over March-June 2020 were recruited between 30 and 180 days after their most recent positive test and a minimum of 14 days after symptoms resolved (Table 59, Table 60). Donors exhibited a wide range of COVID-19 symptoms and experienced either mild or moderate disease according to WHO criteria. Blood draws from convalescents ranged from approximately one to six months from diagnosis. Healthy individuals (N=10) provided cell samples from February 2016 up to November 2019 and had no opportunity for SARS-CoV-2 exposure. Both cohorts contain a balanced proportion of females and males and similar average age and age range. 60% of convalescent donors are from racial and ethnic minorities. No ethnicity information is available for the healthy cohort.

TABLE 59
COVID-19 convalescent and healthy donor cohort characteristics
Donor Characteristics

| | |
|---|---|
| Naïve | Convalescent |
| (N = 10) | (N = 15) |

Age (years)

| | | |
|---|---|---|
| Average | 48.5 | 44.8 |
| Range | 26-79 | 23-71 |

Gender

| | | |
|---|---|---|
| Female | 40% (4/10) | 53.33% (8/15) |
| Male | 60% (6/10) | 46.67% (7/15) |

Ethnicity

| | | |
|---|---|---|
| Caucasian | N/A | 40% (6/15) |
| Hispanic/Latino | N/A | 33.33% (5/15) |
| African American | N/A | 6.67% (1/15) |
| Asian/Pacific Islander | N/A | 20% (3/15) |

Disease Severity

| | | |
|---|---|---|
| Mild | N/A | 73.33% (11/15) |
| Moderate | N/A | 26.67% (4/15) |
| Severe | N/A | 0 |
| Critical | N/A | 0 |

Recruitment

| | | |
|---|---|---|
| Sample Collection Date | February 2016-November 2019 | May-October 2020 |
| Date Tested Positive | N/A | March-June 2020 |
| Time Since Last Positive Test (Days) | N/A | 33-158 |
| Time Since Symptoms Resolved (Days) | N/A | 26-116 |
| Date Last Tested Positive | N/A | March-June 2020 |
| Date Symptoms Resolved | N/A | March-June 2020 |
| PCR Positivity | N/A | 100% (15/15) |

TABLE 60
Additional COVID-19 convalescent and healthy
donor cohort characteristics
Donor Characteristics

| | |
|---|---|
| Naïve | Convalescent |
| (N = 10) | (N = 15) |

BMI

| Range | N/A | 21.1-43.4 | |
|---|---|---|---|
| Obese | N/A | 13.33% | (2/15) |
| Overweight | N/A | 46.67% | (7/15) |
| Normal | N/A | 40% | (6/15) |

| | | |
|---|---|---|
| Underweight | N/A | 0 |

Symptoms

| Fever | N/A | 73.33% | (11/15) |
|---|---|---|---|
| Fever Duration (days) | N/A | 1.5-14 | |
| Cough | N/A | 80% | (12/15) |
| Shortness of breath | N/A | 46.67% | (7/15) |
| Muscle pain | N/A | 80% | (12/15) |
| Headache | N/A | 93.33% | (14/15) |
| Sore throat | N/A | 53.33% | (8/15) |
| Loss of taste or smell | N/A | 73.33% | (11/15) |
| Nausea | N/A | 26.67% | (4/15) |
| Weight Loss | N/A | 6.67% | (1/15) |
| Loss of appetite | N/A | 20% | (3/15) |
| Diarrhea | N/A | 40% | (6/15) |
| Urinary Incontinence | N/A | 6.67% | (1/15) |
| Fatigue | N/A | 20% | (3/15) |
| Malaise | N/A | 6.67% | (1/15) |
| Sweats | N/A | 20% | (3/15) |
| Chills | N/A | 20% | (3/15) |
| Dizziness | N/A | 13.33% | (2/15) |
| Pneumonia | N/A | 13.33% | (2/15) |
| Anemia | N/A | 6.67% | (1/15) |
| Sensitivity to light | N/A | 6.67% | (1/15) |
| Peeling Skin | N/A | 6.67% | (1/15) |
| Chest Pain | N/A | 6.67% | (1/15) |
| Back Pain | N/A | 6.67% | (1/15) |
| Numbing of foot | N/A | 6.67% | (1/15) |

Disease Severity

| | | | |
|---|---|---|---|
| Mild | N/A | 73.33% | (11/15) |
| Moderate | N/A | 26.67% | (4/15) |

| | | |
|---|---|---|
| Severe | N/A | 0 |
| Critical | N/A | 0 |

Past Medical History

| | | |
|---|---|---|
| Asthma | 20% | (3/15) |
| Fibroids | 6.67% | (1/15) |
| Myopia | 20% | (3/15) |
| Hypertension | 13.33% | (2/15) |
| GERD | 20% | (3/15) |
| Hyperopia | 13.33% | (2/15) |
| Arthritis | 6.67% | (1/15) |
| Hypothyroidism | 13.33% | (2/15) |
| Cataract | 6.67% | (1/15) |
| Osteopenia | 6.67% | (1/15) |
| Breast cancer (in remission) | 6.67% | (1/15) |
| Osteoarthritis | 6.67% | (1/15) |

Allergies

| | | |
|---|---|---|
| Seasonal | 6.67% | (1/15) |
| Dust | 6.67% | (1/15) |
| Sulfa | 13.33% | (2/15) |
| Ceclor | 6.67% | (1/15) |
| Dairy | 6.67% | (1/15) |
| Unknown medications | 6.67% | (1/15) |

Current Medications

| | | |
|---|---|---|
| Metoprolol | 6.67% | (1/15) |
| Inhaler | 6.67% | (1/15) |
| Natural D-Hist | 6.67% | (1/15) |
| Vitamin C | 6.67% | (1/15) |
| Aspirin | 6.67% | (1/15) |
| Losartin | 6.67% | (1/15) |
| Protonix | 6.67% | (1/15) |
| Amlodipine | 6.67% | (1/15) |
| Meprazole | 6.67% | (1/15) |
| Naprosyn | 6.67% | (1/15) |
| Vitamin B | 6.67% | (1/15) |
| Multivitamin | 6.67% | (1/15) |
| Fish Oil | 6.67% | (1/15) |
| Zinc | 6.67% | (1/15) |
| Magnesium | 6.67% | (1/15) |
| Tumeric | 6.67% | (1/15) |
| Atenolol | 6.67% | (1/15) |
| Levothryoxine | 6.67% | (1/15) |
| Pantoprazole | 6.67% | (1/15) |
| Lisinopril | 6.67% | (1/15) |
| Vitamin D3 | 6.67% | (1/15) |

Lifestyle Habits

| | | |
|---|---|---|
| Tobacco Use (used to smoke) | 40% | (6/15) |
| Light Caffeine Use | 6.67% | (1/15) |
| Heavy Caffeine Use | 66.67% | (10/15) |
| Light Alcohol Use | 26.67% | (4/15) |
| Moderate Alcohol Use | 26.67% | (4/15) |
| Recreational Drug Use | 6.67% | (1/15) |
| Marijuana Use | 33.33% | (5/15) |

### Predicted Epitopes are Recognized in Natural SARS-CoV-2 Infection

[0458] To determine what predicted effector CD4⁺ T cell epitope clusters are recognized by T cells raised in SARS-CoV-2 infection, we conducted ex vivo IFNγFluorospot assays using whole PBMC preparations from convalescent donors. Immune recall in the Fluorospot assay was stimulated using either individual or pooled peptides. Responses that were both >25 spot forming cells over background and >5-fold over background were considered positive. In preliminary studies, a small cohort of donors were stimulated with lower concentrations of peptide (0.313 μg/mL per pooled peptide, 10 μg/mL for individual peptide stimulations). These concentrations were increased to potentially heighten assay sensitivity, however, we found that there was no significant difference in the frequency of epitope-specific clones nor in the number of peptides detected per donor between the assay conditions, thus both data sets are combined here.

[0459] Overall, we found that the majority of COVID-19 convalescent donors (9/15; 60%) responded to a pool of the 32 peptides (FIG. 121A). In contrast, only a single healthy control donor out of ten demonstrated immune recall, just above the threshold, to this pool. Individual peptide stimulations showed that COVID-19 convalescent donors had positive responses to envelope, membrane, and spike peptides, including responses in the Si and S2 domains and RBD (FIG. 121D).

[0460] For 21/32 (66%) peptides, a recall response was observed in at least one convalescent donor, (corresponding to 1/1 envelope-derived epitope, 7/8 (87.5%) membrane-derived epitopes, 13/23 (56.5%) spike-derived epitopes); 14/32 (44%) peptides were confirmed in at least 20% of convalescent donors (FIG. 121C).

[0461] The number of peptides confirmed per donor ranged from 0 to 18 with an average response of 4-5 peptides per convalescent donor (FIG. 121B). Of the healthy donors, only two recognized any of the peptides ex vivo: the aforementioned donor responding to the total peptide pool recalled the sole envelope epitope (peptide 1) and an S2-derived sequence (peptide 25), while another donor mounted a response to an S2 domain sequence (peptide 26). Although rare, these findings suggest that there may be a memory response that cross-reacts with prior common cold coronavirus infection.

[0462] Given the variable patterns of epitope-specific responses, we also evaluated the cumulative response to specific antigens by batching the response to individual peptides (FIG. 122A). As expected from the individual donor peptide analysis, T cells specific for membrane-derived epitopes were most frequently recalled with 11/15 donors demonstrating significant anti-membrane responses and membrane epitope-specific T cells making up >40% of the total recall response in 10/11 donors. We also found that despite greater variability in responses to individual S1-derived epitopes, the magnitude of the response to these peptides was similar to the magnitude of membrane-specific T cell responses in individual donors.

[0463] Interestingly, the quality of each donor's cumulative response could be used to distinguish three distinct immunophenotypes within the cohort. These cohorts were defined by whether individuals mounted a (1) robust, (2) weak, or (3) no T cell response. Furthermore, divergent trends in terms of responses could be identified for males and females (FIG. 122B).

[0464] While similar T cell response levels were observed in the younger individuals evaluated in this study, regardless of sex, they diverge with age with higher effector T cell responses in males only (R=0.757, p=0.011, n=7); conversely, older women (>50 years) primarily exhibit decreased T cell activity. Correlation analysis in the complete cohort of women did not achieve significance (R<0.0001, p=0.993, n=8) due to two outliers (both moderate cases; pneumonia without requiring supplemental oxygen or hospitalization) and possibly because of the small size of the study. However, in the absence of these outliers, the cohort of women with mild cases shows a significant correlation between effector T cell responses and age (R=0.704, p=0.037,n=6)

[0465] Collectively, these findings highlight the high prevalence of membrane-targeted T cell responses in most COVID-19 cases and demonstrates the importance of targeting spike in SARS-CoV-2 vaccination to hasten and focus T cell responses to this antigen upon infection.

### Pre-Existing SARS-CoV-2 Immunity in Healthy Donors is Stimulated by Predicted Epitopes Following Antigen-Specific Cell Expansion

[0466] While convalescent donors as a group recognized a majority of predicted epitopes ex vivo, as individuals, each recognized only a smaller subset. We hypothesized that SARS-CoV induced T cell clones underwent variable expansion and contraction over the course of disease resulting in memory T cell populations resulting in frequencies of T cell responses that were both detectable and undetectable ex vivo. To uncover low frequency epitope-specific T cells, PBMCs were stimulated with SARS-CoV-2 peptides and expanded in short-term culture and then re-stimulated with individual or pools of peptides in an IFNγ Fluorospot assay. Although changes to cellular phenotypes over the course of in vitro expansion do not represent the natural immune response to infection, expansion of epitope-specific T cells present ex vivo and their detection by cultured Fluorospot assay may augment the repertoire of immunogenic SARS-CoV-2 T cell epitopes and suggest greater T cell memory is generated than thought from ex vivo recall alone.

[0467] Using the same criteria defining an IFNγ response as above, we found that 11/15 (73.3%) convalescent donors mounted a response to the pool of 32 peptides (FIG. 123A). Like the ex vivo assay, individual peptide stimulations showed positive responses to envelope and membrane peptides, as well as spike peptides covering the S1 and S2 domains and RBD (FIG. 123D). Only a single S2-derived epitope was not recalled. Convalescent donors recognized between 0 and 27 peptides with an average of 9-10 peptide responses per donor. (FIG. 123B). At least one convalescent donor recognized 31/32 (96.9%) peptides, with the majority of peptides (26/32; including 0/1 envelope epitope, 6/8 membrane epitopes, and 20/23 spike epitopes) being confirmed in ≥20% of our cohort. (FIG. 123C).

[0468] Changes in IFNγ responses between ex vivo and cultured assay measurements identify broader patterns of peptide recognition associated with source antigen (Data not shown). For example, responses identified in convalescent donors to envelope and membrane-derived antigens were rarely replicated following culture in donors that exhibited positive responses ex vivo. In contrast, responses to spike-derived peptides were primarily identified following culture, however those that did response ex vivo were much more likely to maintain positive responses following culture as well. These differences may reflect variable memory phenotypes (effector vs. central), proliferative capacities, and/or activation/exhaustion profiles of epitope-specific T cell populations following natural infection.

[0469] Healthy donors mounted strong recall responses to SARS-CoV-2 T cell epitopes following expansion culture in sharp contrast to the ex vivo response. To the pool of 32 peptides, 8/10 (80%) healthy donors elicited detectable IFNγ responses (FIG. 123A). To individual peptide restimulations, cross-reactive T cell responses were found to envelope, membrane, and spike Si, S2, and RBD-derived peptides (FIG. 123D). On average individual control donors responded to 15 peptides, ranging from 0-27 recognized peptides per donor (FIG. 123B). Following culture, 31/32 (96.9%) peptides stimulated responses in at least one control donor. Of these, only a single peptide was not confirmed in ≥20% of the healthy cohort (FIG. 123C). The 30 peptides correspond to 1/1 envelope peptide, 6/8 membrane peptides, and 23/23 spike peptides. Overall, the magnitude and prevalence of cross-reactive T cell responses in donors with no SARS-CoV-2 history suggests T cell memory to common cold coronavirus infection may contribute to immune response to SARS-CoV-2 infection.

### SARS-CoV-2 Peptide Vaccination Stimulates Type 1 Immunity

[0470] Confirmation that these predicted SARS-CoV-2 peptides are recognized by T cells raised in infection suggested that they may elicit de novo immune responses by vaccination. Peptide vaccination may prime CD4 and CD8 T cells and generate immune memory that is recalled upon infection to support protective humoral and cellular mechanisms of immunity. Of the 32 peptides, we selected the highest EpiMatrix scoring peptides (above 20) for vaccination. (One peptide was removed to due to poor solubility in the pool and was replaced with the 21^{st} ranked peptide.) Twenty peptides is in range with what is used in peptide vaccine clinical trials. Peptides were formulated with poly-ICLC (Hiltonol), an adjuvant composed of carboxymethylcellulose, poly-inosinic-poly-cytidylic acid, and poly-L-lysine double-stranded RNA, that stimulates the TLR-3 and MDA-5 innate immune pathways and Thl -skewed CD4 T cell responses.

[0471] HLA-DR3 transgenic mice were primed and boosted with the peptide vaccine (EPV-CoV-19) to assess in vivo vaccine immunogenicity in the context of human MHC restriction, which is not feasible using wild-type mice. MHC Class II-mediated cellular immunity in the mouse MHC-II knockout/HLA-DR3 knock-in transgenic strain is completely restricted by human MHC, not by its murine ortholog, and presents peptides that are also recognized by human T cells. Thus, vaccine immunogenicity in the HLA-DR3 mouse model may support human application of SARS-CoV-2 peptides. Mice were immunized by the intradermal route. A published peptide vaccine clinical trial utilizing poly-ICLC adjuvant and intradermal route of immunization reported minimal injection site reactions and no toxicity associated with the immunizations.

[0472] The type 1/type 2 T cell balance stimulated by vaccination was assessed by measuring cytokine production. IFNγ production was measured as a marker of type 1 responses and IL-4 and IL-5 as markers of type 2 responses. In an IFNγ/IL-4 dual cytokine Fluorospot assay (FIG. 124A), splenocytes from individual mice were stimulated with pools of all vaccine peptides, as well as membrane-derived peptides or spike-derived peptides in the vaccine. All low- and high-dose vaccinated mice mounted an IFNγ response to each pool, as defined by SFC (FIG. 124B) and SI (FIG. 124C) criteria. Although the magnitude of response to each pool was statistically no different between the low- and high-dose groups, the ratio of spike-specific:membrane-specific IFNγ responses was significantly higher in animals that received the high-dose vaccine. Control mice that received either poly-ICLC only or saline did not respond. IL-4 secretion meeting both positivity criteria was not detected in either immunized or mock-immunized mice (FIG. 124D-E). A ratio of the IFNγ and IL-4 responses was used as an indicator of the type 1/type 2 T cell balance. For both the low-dose and high-dose vaccine groups, the IFNγ/IL-4 ratio skews strongly toward type 1 (FIG. 124F).

[0473] To assess cytokine production in T cell subpopulations, we used intracellular cytokine staining and flow cytometry to measure frequency, mean fluorescence intensity, and differentiation status of splenic CD4⁺ and CD8⁺ T cells responding to EPV-CoV-19 peptides. Representative flow cytometry data, inlduing gating, is shown in FIG. 125A. EPV-CoV-19 vaccination at both low and high doses stimulated statistically significant increases in numbers of IFNγ-producing memory T cells that were recalled specifically by vaccine peptides, as well as increased average amounts of IFNγ produced per cell compared to control mice (FIG. 125B and data not shown). In contrast, neither IL-4 nor IL-5 production from memory CD4⁺ and CD8⁺ T cells could be restimulated by vaccine peptides in vitro, above controls (FIG. 125C-D). Although we do note a minimal increase in the frequency of IL-5-producing CD4⁺ T cells from vaccinated animals (Data not shown) there is no concurrent increase in IL-5 production per cell, nor is the magnitude of this response comparable to the induction of Th1 subsets, thus minimizing the functional significance of this observation.

[0474] Overall, both the low-dose and high-dose vaccine groups exhibit IFNγ/(IL-4+IL-5) ratios that sharply skew toward Th1/Tc1 (FIG. 125E). Taken altogether, these results show EPV-CoV-19 stimulates a strong T cell response that can be recalled to elicit a potent type 1-skewed response in a dose-independent manner while also critically avoiding significant type 2 induction that is associated with enhanced respiratory disease.

### Example 8

### Overall Design:

[0475] A total of 28 healthy participants who meet the eligibility criteria will be enrolled in this study. The participants will be divided into 4 sequential cohorts of 7 participants each, with randomization of treatment within cohorts so that 5 participants receive active vaccine and 2 receive saline placebo. The first 3 cohorts will consist of participants seronegative for severe acute respiratory syndrome coronavirus 2 (SARS-CoV-2) antibody who will receive either placebo or vaccine with 10 μg/peptide if in the first cohort, 50 μg/peptide if in the second cohort and 150 μg/peptide if in the third. The fourth cohort will consist of participants seropositive for SARS-CoV-2 antibody who will receive either saline placebo or a vaccine dose of 10 μg/peptide.

[0476] The dose levels for dose escalation are planned as 10 μg, 50 μg, and 150 μg per peptide, administered intradermally. The starting dose for EPV-CoV-19 Vaccine will be 10 μg per peptide (for up to 20 peptides). The maximum dose, 150 μg per peptide, is lower than the subcutaneous or intramuscular doses (300 μg per peptide) used in Phase 2/3 studies reported by Ott et al for their neoantigen peptide vaccine clinical study. The total peptide dose proposed for the FIH study will be well below those administered safely in previous clinical studies using synthetic peptides.

[0477] A staggered dosing will be used for each cohort:

[0478] On Day 1, 1 participant will receive EPV-CoV-19 Vaccine and 1 participant will receive saline placebo.

[0479] The remaining participants will be dosed at least 48 hours (h) later provided satisfactory safety and tolerability is demonstrated for the participants dose on Day 1.

[0480] All participants in the dose ranging part of the study (Cohort 1 to Cohort 3) will go through a Screening Period of up to 14 days (Day −14 to Day −1), while those with positive serum antibodies for SARS-CoV-2 (Cohort 4) will have a Screening Period of up to 30 days (Day −30 to Day −1). Study intervention (including saline placebo and EPV-CoV-19 Vaccine) will be given to all participants at the study site on Day 1 and Day 15. Participants will be released at the discretion of the Investigator following completion of the assessment at 60 minutes post each vaccination provided there are no safety concerns identified from the review of the clinical safety data. All participants will return to the study site on Day 3 (2 days after the first vaccination), Day 8 (one week after the first vaccination), Day 22 (one week after the second vaccination), Day 43 (28 days after the second vaccination), and at 2, 6, and 12 months after the second vaccination for safety, tolerability, and immunogenicity follow-up. Participants will receive monthly phone calls from 3 months after the second vaccination until the end of study (EOS) for safety and efficacy follow-up, except for the months (M6 and M12) where site visit is required. An unscheduled visit for safety and coronavirus disease 2019 (COVID-19) symptom follow-up may be needed as judged by the Investigator.

[0481] Safety, tolerability, and immunogenicity data for each cohort will be reviewed by the Safety Monitoring Committee (SMC) before the dose escalation to the next cohort and before involving SARS-CoV-2 antibody positive participants. Dose escalation will only take place after one week of safety follow-up for the second vaccination of the last participant in the previous cohort is completed and provided EPV-CoV-19 is well tolerated following review of all safety, tolerability, and immunogenicity data from the previous cohort by the SMC. Similarly, the cohort of SARS-CoV-2 antibody positive participants will only receive investigational product after one week of safety follow-up for the second vaccination of the last participant from the dose ranging groups is completed and provided EPV-CoV-19 is well tolerated following review of all safety, tolerability, and immunogenicity data from the previous cohort by the SMC. Due to the logistics of the bioanalytical immunogenicity analysis, immunogenicity data for the most recently enrolled cohort will not be included in the safety review for the cohort, but will be included when available in subsequent reviews. Screening procedures may continue between dose escalations to facilitate enrollment of remaining participants.

### Brief Summary:

[0482] The purpose of this study is to assess the safety, tolerability, and immunogenicity of EPV-CoV-19 Vaccine (T cell epitope-driven) compared with saline placebo in healthy participants. Study details include:

[0483] The study duration will be up to: 13 months for Cohort 1 to Cohort 3 and 13.5 months for Cohort 4

[0484] The treatment duration will be up to: 15 days

[0485] The visit frequency will be: Day 1, Day 3, weekly from Day 8 to Day 22, followed by Day 43, and at 2, 6, and 12 months after the second vaccination; follow-up by phone calls will be performed monthly from 3 months after the second vaccination till the EOS, except for the months (M6 and M12) where site visit is required.

### Number of Participants:

[0486] A maximum of 28 healthy participants will be randomly assigned to study intervention.

[0487] Note: “Enrolled” means a participant's, or their legally acceptable representative's, agreement to participate in a clinical study following completion of the informed consent process and screening. Potential participants who are screened for the purpose of determining eligibility for the study, but do not participate in the study, are not considered enrolled, unless otherwise specified by the protocol. A participant will be considered enrolled if the informed consent is not withdrawn prior to participating in any study activity after screening.

### Intervention Groups and Duration:

[0488] Total duration of study participation for participants in the dose ranging part of the study (Cohort 1 to Cohort 3) will be up to 13 months and that for participants with positive serum antibodies for SARS-CoV-2 (Cohort 4) will be up to 13.5 months: a Screening Period of up to 14 days, a Treatment and Follow-up Period of 75 days (from first dosing to 60 days after the second dosing), and a Long-term Follow-up Period up to 12 months after the second vaccination.

[0489] Participants will receive study intervention (including saline placebo and EPV-CoV-19 Vaccine [10 μg, 50 μg, and 150 μg per peptide for up to 20 peptides]) administered by the Investigator/authorized study personnel at the study site on Day 1 and Day 15. Exemplary vaccines are found in Table 61 using the peptide pools found in Table 62.

TABLE 61

| Vaccine | Pool 1 | Pool 2 | Pool 3 | Pool 4 |
|---|---|---|---|---|
| 1 | 2 | 50 | 57 | 107 |
| 2 | 2 | 50 | 58 | 108 |
| 3 | 3 | 51 | 57 | 107 |
| 4 | 3 | 51 | 58 | 108 |
| 5 | 6 | 53 | 57 | 107 |
| 6 | 6 | 53 | 58 | 108 |
| 7 | 7 | 54 | 57 | 107 |
| 8 | 7 | 54 | 58 | 108 |
| 9 | 9 | 43 | 57 | 107 |
| 10 | 9 | 43 | 58 | 108 |
| 11 | 10 | 44 | 57 | 107 |
| 12 | 10 | 44 | 58 | 108 |
| 13 | 13 | 49 | 57 | 107 |
| 14 | 13 | 49 | 58 | 108 |
| 15 | 14 | 47 | 57 | 107 |
| 16 | 14 | 47 | 58 | 108 |
| 17 | 15 | 37 | 57 | 107 |
| 18 | 15 | 37 | 58 | 108 |
| 19 | 16 | 38 | 57 | 107 |
| 20 | 16 | 38 | 58 | 108 |
| 21 | 19 | 42 | 57 | 107 |
| 22 | 19 | 42 | 58 | 108 |
| 23 | 21 | 41 | 57 | 107 |
| 24 | 21 | 41 | 58 | 108 |
| 25 | 22 | 30 | 57 | 107 |
| 26 | 22 | 30 | 58 | 108 |
| 27 | 23 | 31 | 57 | 107 |
| 28 | 23 | 31 | 58 | 108 |
| 29 | 25 | 34 | 57 | 107 |
| 30 | 25 | 34 | 58 | 108 |
| 31 | 26 | 35 | 57 | 107 |
| 32 | 26 | 35 | 58 | 108 |

TABLE 62

| | Peptide 1 | Peptide 2 | Peptide 3 | Peptide 4 | Peptide 5 |
|---|---|---|---|---|---|
| Pool | (SEQ ID NO:) | (SEQ ID NO:) | (SEQ ID NO:) | (SEQ ID NO:) | (SEQ ID NO:) |
| 2 | 1088 | 1115 | 1070 | 1087 | 1080 |
| 3 | 1092 | 1115 | 1070 | 1087 | 1080 |
| 6 | 1092 | 1089 | 1070 | 1087 | 1080 |
| 7 | 1088 | 1089 | 1070 | 1087 | 1080 |
| 9 | 1088 | 1115 | 1070 | 1085 | 1080 |
| 10 | 1092 | 1115 | 1070 | 1085 | 1080 |
| 13 | 1092 | 1089 | 1070 | 1085 | 1080 |
| 14 | 1088 | 1089 | 1070 | 1085 | 1080 |
| 15 | 1092 | 1089 | 1078 | 1087 | 1080 |
| 16 | 1088 | 1089 | 1078 | 1087 | 1080 |
| 19 | 1092 | 1115 | 1078 | 1087 | 1080 |
| 21 | 1088 | 1115 | 1078 | 1087 | 1080 |
| 22 | 1092 | 1089 | 1078 | 1085 | 1080 |
| 23 | 1088 | 1089 | 1078 | 1085 | 1080 |
| 25 | 1088 | 1115 | 1078 | 1085 | 1080 |
| 26 | 1092 | 1115 | 1078 | 1085 | 10® |
| 30 | 1088 | 1115 | 1070 | 1087 | 1066 |
| 31 | 1092 | 1115 | 1070 | 1087 | 1066 |
| 34 | 1092 | 1089 | 1070 | 1087 | 1066 |
| 35 | 1088 | 1089 | 1070 | 1087 | 1066 |
| 37 | 1088 | 1115 | 1070 | 1085 | 1066 |
| 38 | 1092 | 1115 | 1070 | 1085 | 1066 |
| 41 | 1092 | 1089 | 1070 | 1085 | 1066 |
| 42 | 1088 | 1089 | 1070 | 1085 | 1066 |
| 43 | 1092 | 1089 | 1078 | 1087 | 1066 |
| 44 | 1088 | 1089 | 1078 | 1087 | 1066 |
| 47 | 1092 | 1115 | 1078 | 1087 | 1066 |
| 49 | 1088 | 1115 | 1078 | 1087 | 1066 |
| 51 | 1088 | 1089 | 1078 | 1085 | 1066 |
| 53 | 1088 | 1115 | 1078 | 1085 | 1066 |
| 54 | 1092 | 1115 | 1078 | 1085 | 1066 |
| 57 | 1104 | 1107 | 1110 | 1116 | 1105 |
| 58 | 1081 | 1107 | 1110 | 1116 | 1105 |
| 107 | 1081 | 1055 | 1093 | 1100 | 1066 |
| 108 | 1104 | 1055 | 1093 | 1100 | 1066 |

[0490] On each dosing day, the study intervention will be given as four separate i.d. injections (0.5 mL per injection) to each of the four extremities by Mantoux technique. As EPV-CoV-19 Vaccine is composed of four peptide pools (five peptides per pool), each pool will be injected at one injection site. The injection sites at each time will be schematically documented in the case report form (CRF). Participants will be released at the discretion of the Investigator following completion of the assessment at 60 minutes post each vaccination provided there are no safety concerns identified from the review of the clinical safety data.

### Stopping/Halting Rules:

[0491] For each participant, the booster (second dosing) will be halted if one of the following occurs: a Grade 2 adverse event (AE) lasting for more than two weeks or, a Grade 3 AE, a hypersensitivity reaction of any grade, or positive pregnancy test.

[0492] For each dosing cohort, study intervention will be halted if one of the following occurs: two Grade 2 AEs lasting for more than two weeks, two Grade 3AEs, one Grade 2 AEs lasting for more than two weeks combined with one Grade 3 AE, or one Grade 4 AE. The study/study enrollment will be halted at the same time if study intervention is halted for a dosing cohort.

[0493] Adverse events will be graded using FDA Guidance for Industry: Toxicity Grading Scale for Healthy Adult and Adolescent Volunteers Enrolled in Preventive Vaccine Clinical Trials (September 2007).

### Safety Monitoring Committee:

[0494] A SMC has been appointed for this study. The SMC includes Principal Investigator (PI), medical monitor, and Sponsor medical representative and is appointed to monitor the safety and scientific integrity of a human research intervention, and to make recommendations to the Sponsor regarding the stopping of a study for efficacy, for harms, or for futility. The composition of the committee is dependent upon the scientific skills and knowledge required for monitoring the study.

### Study Population:

### Inclusion Criteria

[0495] Participants are eligible to be included in the study only if all of the following criteria apply:
   [0496] 1. Ability to provide written informed consent prior to initiation of any study procedures.
   [0497] 2. Be able to understand and agrees to comply with planned study procedures and be available for all study visits.
   [0498] 3. Agrees to the collection of venous blood per protocol.
   [0499] 4. Male or non-pregnant female, 18 to 55 years of age, inclusive, at time of enrollment.
   [0500] 5. Body Mass Index 18-35 kg/m², inclusive, at Screening.
   [0501] 6. Women of childbearing potential must have a negative urine or serum pregnancy test within 24 hours prior to each vaccination.
   [0502] 7. Oral temperature is less than 100.4 degrees Fahrenheit (38.0 degrees Celsius).
   [0503] 8. Pulse no greater than 100 beats per minute.
   [0504] 9. Systolic blood pressure is 85 to 150 mmHg, inclusive.
   [0505] 10. Clinical screening laboratory evaluations (white blood cell [WBC], hemoglobin [Hgb], platelets [PLTs], alanine transaminase [ALT], aspartate transaminase [AST], creatinine [Cr], alkaline phosphatase [ALP], total bilirubin [TBL], Lipase, prothrombin time [PT], and partial thromboplastin time [PTT]) are within acceptable normal reference ranges at the clinical laboratory being used.
   [0506] 11. Must agree to have samples stored for secondary research.
   [0507] 12. The participant must agree to refrain from donating blood or plasma during the study (outside of this study).
   [0508] 13. Negative human immunodeficiency virus (HIV) diagnostic test.
   [0509] 14. Contraceptive use by men and women must be consistent with local regulations regarding the methods of contraception for those participating in clinical studies.
      NOTE: The reliability of sexual abstinence for male and/or female enrollment eligibility needs to be evaluated in relation to the duration of the clinical study and the preferred and usual lifestyle of the participant. Periodic abstinence (e.g., calendar, ovulation, symptothermal, or post ovulation methods) and withdrawal are not acceptable methods of contraception.

[0510] a. Male Participants:
[0511] A male participant must agree to use a highly effective contraception as detailed in Appendix 4 of this protocol during the intervention period and an additional 90 days (a spermatogenesis cycle) after the last dose of study intervention and refrain from donating sperm during this period.

[0512] b. Female Participants:
[0513] A female participant is eligible to participate if she is not pregnant (see Appendix 4), not breastfeeding, and at least one of the following conditions applies:
[0514] Not a woman of childbearing potential (WOCBP) as defined in Appendix 4.
[0515] OR
[0516] A WOCBP who agrees to follow the contraceptive guidance in Appendix 4 during the intervention period and an additional 90 days after the last dose of study intervention.
[0517] Additional criteria applicable only to Cohorts 1-3:
   [0518] 15. Negative test for SARS-CoV-2 in nasopharyngeal swabs/sputum swabs through real-time reverse transcriptase polymerase chain reaction (RT-PCR) and BinaxNow™ COVID-19 test on Day-1.
   [0519] 16. Negative test for serum IgG antibodies to SARS-CoV-2 (titer <1:80) measured by antibody assay (per standardized assay at central laboratory, Mt. Sinai School of Medicine).
[0520] Additional criteria applicable only to Cohort 4:
   [0521] 17. Negative test for SARS-CoV-2 in nasopharyngeal swabs/sputum swabs through RT-PCR and BinaxNow™ COVID-19 test on Day −30 through Day −1.
   [0522] 18. Positive test for serum IgG antibodies to SARS-CoV-2 (titer≥1:80) measured by antibody assay (per standardized assay at central laboratory, Mt. Sinai School of Medicine).
   [0523] 19. Fulfills either one of the following criteria with regard to prior COVID-19 symptoms:
      [0524] a. Never had symptoms of COVID-19.

### OR

[0525] b. Experienced mild to moderate symptoms of COVID-19 that resolved at least 30 days prior to vaccination and never required hospitalization.

### Exclusion Criteria

[0526] Participants are excluded from the study if any of the following criteria apply:
   [0527] 1. Positive pregnancy test either at Screening or just prior to each vaccine administration.
   [0528] 2. Female participant who is breastfeeding or plans to breastfeed from the time of the first vaccination through 60 days after the last vaccination.
   [0529] 3. Has any medical disease or condition that, in the opinion of the site PI or appropriate sub-investigator, precludes study participation.
      Note: including acute, subacute, intermittent or chronic medical disease or condition that would place the participant at an unacceptable risk of injury, render the participant unable to meet the requirements of the protocol, or may interfere with the evaluation of responses or the participant's successful completion of this study.
   [0530] 4. Presence of self-reported or medically documented significant medical or psychiatric condition(s).
      Note: significant medical or psychiatric conditions include but are not limited to:
   [0531] (1) respiratory disease (e.g., chronic obstructive pulmonary disease [COPD], asthma) requiring daily medications currently or any treatment of respiratory disease exacerbations (e.g., asthma exacerbation) in the last 5 years. Asthma medications: inhaled, oral, or intravenous corticosteroids, leukotriene modifiers, long and short acting beta agonists, theophylline, ipratropium, biologics.
   [0532] (2) significant cardiovascular disease (e.g., congestive heart failure, cardiomyopathy, ischemic heart disease) or history of myocarditis or pericarditis as an adult.
   [0533] (3) neurological or neurodevelopmental conditions (e.g., history of migraines in the past 5 years, epilepsy, stroke, seizures in the last 3 years, encephalopathy, focal neurologic deficits, Guillain-Barré syndrome, encephalomyelitis or transverse myelitis).
   [0534] (4) ongoing malignancy or recent diagnosis of malignancy in the last five years excluding basal cell and squamous cell carcinoma of the skin, which are allowed.
   [0535] (5) an autoimmune disease, including hypothyroidism without a defined non-autoimmune cause, localized, or history of psoriasis.
   [0536] (6) An immunodeficiency of any cause.
   [0537] 5. Has an acute illness, as determined by the site PI or appropriate sub-investigator, with or without fever (oral temperature≥38.0 degrees Celsius [100.4 degrees Fahrenheit]) within 72 h prior to each vaccination.
      Note: an acute illness which is nearly resolved with only minor residual symptoms remaining is allowable if, in the opinion of the site PI or appropriate sub-investigator, the residual symptoms will not interfere with the ability to assess safety parameters as required by the protocol.
   [0538] 6. Has a positive test result for hepatitis B surface antigen, hepatitis C virus antibody, or HIV types 1 or 2 antibodies at Screening.
   [0539] 7. Has participated in another investigational study involving any investigational product (including study drug, biologic, or device) within 60 days, or 5 half-lives, whichever is longer, before the first vaccine administration.
   [0540] 8. Currently enrolled in or plans to participate in another clinical trial with an investigational agent (including licensed or unlicensed vaccine, drug, biologic, device, blood product, or medication) that will be received during the study reporting period (or 13 months after the first vaccination).
   [0541] 9. Has a history of hypersensitivity or severe allergic reaction (e.g., anaphylaxis, generalized urticaria, angioedema, other significant reaction) to any previous licensed or unlicensed vaccines.
   [0542] 10. Chronic use (more than 14 continuous days) of any medications that may be associated with impaired immune responsiveness. This includes, but not limited to, systemic corticosteroids exceeding 10 mg/day of prednisone equivalent, allergy injections, immunoglobulin, interferon, immunomodulators, cytotoxic drugs, or other similar or toxic drugs during the preceding 6-month period prior to the first vaccine administration. The use of low dose topical, ophthalmic, inhaled and intranasal steroid preparations will be permitted.
   [0543] 11. Received immunoglobulins and/or any blood or blood products within the 4 months before the first vaccine administration or at any time during the study.
   [0544] 12. Has any blood dyscrasias or significant disorder of coagulation.
   [0545] 13. Has a history of alcohol abuse or other recreational drug (excluding cannabis) use within 6 months before the first vaccine administration.
   [0546] 14. Has any abnormality or permanent body art (e.g., tattoo) that will interfere with the ability to observe local reactions at the injection site (deltoid/thigh region).
   [0547] 15. Received or plans to receive a licensed, live vaccine within 4 weeks before or after each vaccination.
   [0548] 16. Received or plans to receive a licensed, inactivated vaccine within 2 weeks before or after each vaccination.
   [0549] 17. Receipt of any other SARS-CoV-2 or other experimental coronavirus vaccine at any time prior to or during the study.
   [0550] 18. On current treatment with investigational agents for prophylaxis of COVID-19.
   [0551] 19. Current use of any prescription or over-the-counter medications within 7 days prior to vaccination, unless approved by the Investigator.
   [0552] 20. Plan to travel outside the US (continental US, Hawaii, and Alaska) from enrollment through 28 days after the second vaccination.
   [0553] 21. Participant allergic to any component of the investigational vaccine, or a more severe allergic reaction and history of allergies in the past.
   [0554] 22. Direct contact with a person who has tested positive for SARS-CoV-2 within 30 days of enrollment.
[0555] Additional criteria applicable only to Cohorts 1-3:
   [0556] 23. A history of laboratory-confirmed SARS-CoV-2 infection.
   [0557] 24. Participant has had clinical signs and symptoms consistent with SARS-CoV-2 infection (including stuffy or runny nose, score throat, shortness of breath, cough, low energy or tiredness, muscle or body aches, headache, chills or shivering, feeling hot or feverish, nausea, vomit, diarrhea, reduced sense of smell and taste, as specified in the FDA guidance) within 2 weeks prior to the first vaccination.
[0558] Additional criterion applicable only to Cohort 4:
[0559] Participant has had clinical signs and symptoms consistent with SARS-CoV-2 infection (including stuffy or runny nose, score throat, shortness of breath, cough, low energy or tiredness, muscle or body aches, headache, chills or shivering, feeling hot or feverish, nausea, vomit, diarrhea, reduced sense of smell and taste, as specified in the FDA guidance) and a positive SARS-CoV-2 test result within 30 days prior to the first vaccination.

The application's sequence listing, which the Patent Office published only in electronic form, follows.

SEQUENCE LISTING (8692 sequences)

SEQ ID NO: 1 - protein, 75 aa, Severe Acute Respiratory Syndrome coronavirus 2 (SARS-CoV-2)
MYSFVSEETGTLIVNSVLLFLAFVVFLLVTLAILTALRLCAYCCNIVNVSLVKPSFYVYSRVKNLNSSRVPDLLV

SEQ ID NO: 2 - protein, 222 aa, Severe Acute Respiratory Syndrome coronavirus 2 (SARS-CoV-2)
MADSNGTITVEELKKLLEQWNLVIGFLFLTWICLLQFAYANRNRFLYIIKLIFLWLLWPVTLACFVLAAVYRINWITGGIAIAMACLVGLMWLSYFIASFRLFARTRSMWSFNPETNILLNVPLHGTILTRPLLESELVIGAVILRGHLRIAGHHLGRCDIKDLPKEITVATSRTLSYYKLGASQRVAGDSGFAAYSRYRIGNYKLNTDHSSSSDNIALLVQ

SEQ ID NO: 3 - protein, 1273 aa, Severe Acute Respiratory Syndrome coronavirus 2 (SARS-CoV-2)
MFVFLVLLPLVSSQCVNLTTRTQLPPAYTNSFTRGVYYPDKVFRSSVLHSTQDLFLPFFSNVTWFHAIHVSGTNGTKRFDNPVLPFNDGVYFASTEKSNIIRGWIFGTTLDSKTQSLLIVNNATNVVIKVCEFQFCNDPFLGVYYHKNNKSWMESEFRVYSSANNCTFEYVSQPFLMDLEGKQGNFKNLREFVFKNIDGYFKIYSKHTPINLVRDLPQGFSALEPLVDLPIGINITRFQTLLALHRSYLTPGDSSSGWTAGAAAYYVGYLQPRTFLLKYNENGTITDAVDCALDPLSETKCTLKSFTVEKGIYQTSNFRVQPTESIVRFPNITNLCPFGEVFNATRFASVYAWNRKRISNCVADYSVLYNSASFSTFKCYGVSPTKLNDLCFTNVYADSFVIRGDEVRQIAPGQTGKIADYNYKLPDDFTGCVIAWNSNNLDSKVGGNYNYLYRLFRKSNLKPFERDISTEIYQAGSTPCNGVEGFNCYFPLQSYGFQPTNGVGYQPYRVVVLSFELLHAPATVCGPKKSTNLVKNKCVNFNFNGLTGTGVLTESNKKFLPFQQFGRDIADTTDAVRDPQTLEILDITPCSFGGVSVITPGTNTSNQVAVLYQDVNCTEVPVAIHADQLTPTWRVYSTGSNVFQTRAGCLIGAEHVNNSYECDIPIGAGICASYQTQTNSPRRARSVASQSIIAYTMSLGAENSVAYSNNSIAIPTNFTISVTTEILPVSMTKTSVDCTMYICGDSTECSNLLLQYGSFCTQLNRALTGIAVEQDKNTQEVFAQVKQIYKTPPIKDFGGFNFSQILPDPSKPSKRSFIEDLLFNKVTLADAGFIKQYGDCLGDIAARDLICAQKFNGLTVLPPLLTDEMIAQYTSALLAGTITSGWTFGAGAALQIPFAMQMAYRFNGIGVTQNVLYENQKLIANQFNSAIGKIQDSLSSTASALGKLQDVVNQNAQALNTLVKQLSSNFGAISSVLNDILSRLDKVEAEVQIDRLITGRLQSLQTYVTQQLIRAAEIRASANLAATKMSECVLGQSKRVDFCGKGYHLMSFPQSAPHGVVFLHVTYVPAQEKNFTTAPAICHDGKAHFPREGVFVSNGTHWFVTQRNFYEPQIITTDNTFVSGNCDVVIGIVNNTVYDPLQPELDSFKEELDKYFKNHTSPDVDLGDISGINASVVNIQKEIDRLNEVAKNLNESLIDLQELGKYEQYIKWPWYIWLGFIAGLIAIVMVTIMLCCMTSCCSCLKGCCSCGSCCKFDEDDSEPVLKGVKLHYT

SEQ ID NO: 4 - protein, 25 aa, Severe Acute Respiratory Syndrome coronavirus 2 (SARS-CoV-2)
MYSFVSEETGTLIVNSVLLFLAFVV

SEQ ID NO: 5 - protein, 9 aa, Severe Acute Respiratory Syndrome coronavirus 2 (SARS-CoV-2)
MYSFVSEET

SEQ ID NO: 6 - protein, 9 aa, Severe Acute Respiratory Syndrome coronavirus 2 (SARS-CoV-2)
YSFVSEETG

SEQ ID NO: 7 - protein, 9 aa, Severe Acute Respiratory Syndrome coronavirus 2 (SARS-CoV-2)
SFVSEETGT

SEQ ID NO: 8 - protein, 9 aa, Severe Acute Respiratory Syndrome coronavirus 2 (SARS-CoV-2)
FVSEETGTL

SEQ ID NO: 9 - protein, 9 aa, Severe Acute Respiratory Syndrome coronavirus 2 (SARS-CoV-2)
VSEETGTLI

SEQ ID NO: 10 - protein, 9 aa, Severe Acute Respiratory Syndrome coronavirus 2 (SARS-CoV-2)
SEETGTLIV

SEQ ID NO: 11 - protein, 9 aa, Severe Acute Respiratory Syndrome coronavirus 2 (SARS-CoV-2)
EETGTLIVN

SEQ ID NO: 12 - protein, 9 aa, Severe Acute Respiratory Syndrome coronavirus 2 (SARS-CoV-2)
ETGTLIVNS

SEQ ID NO: 13 - protein, 9 aa, Severe Acute Respiratory Syndrome coronavirus 2 (SARS-CoV-2)
TGTLIVNSV

SEQ ID NO: 14 - protein, 9 aa, Severe Acute Respiratory Syndrome coronavirus 2 (SARS-CoV-2)
GTLIVNSVL

SEQ ID NO: 15 - protein, 9 aa, Severe Acute Respiratory Syndrome coronavirus 2 (SARS-CoV-2)
TLIVNSVLL

SEQ ID NO: 16 - protein, 9 aa, Severe Acute Respiratory Syndrome coronavirus 2 (SARS-CoV-2)
LIVNSVLLF

SEQ ID NO: 17 - protein, 9 aa, Severe Acute Respiratory Syndrome coronavirus 2 (SARS-CoV-2)
IVNSVLLFL

SEQ ID NO: 18 - protein, 9 aa, Severe Acute Respiratory Syndrome coronavirus 2 (SARS-CoV-2)
VNSVLLFLA

SEQ ID NO: 19 - protein, 9 aa, Severe Acute Respiratory Syndrome coronavirus 2 (SARS-CoV-2)
NSVLLFLAF

SEQ ID NO: 20 - protein, 9 aa, Severe Acute Respiratory Syndrome coronavirus 2 (SARS-CoV-2)
SVLLFLAFV

SEQ ID NO: 21 - protein, 9 aa, Severe Acute Respiratory Syndrome coronavirus 2 (SARS-CoV-2)
VLLFLAFVV

SEQ ID NO: 22 - protein, 31 aa, Severe Acute Respiratory Syndrome coronavirus 2 (SARS-CoV-2)
VNSVLLFLAFVVFLLVTLAILTALRLCAYCC

SEQ ID NO: 23 - protein, 9 aa, Severe Acute Respiratory Syndrome coronavirus 2 (SARS-CoV-2)
VNSVLLFLA

SEQ ID NO: 24 - protein, 9 aa, Severe Acute Respiratory Syndrome coronavirus 2 (SARS-CoV-2)
NSVLLFLAF

SEQ ID NO: 25 - protein, 9 aa, Severe Acute Respiratory Syndrome coronavirus 2 (SARS-CoV-2)
SVLLFLAFV

SEQ ID NO: 26 - protein, 9 aa, Severe Acute Respiratory Syndrome coronavirus 2 (SARS-CoV-2)
VLLFLAFVV

SEQ ID NO: 27 - protein, 9 aa, Severe Acute Respiratory Syndrome coronavirus 2 (SARS-CoV-2)
LLFLAFVVF

SEQ ID NO: 28 - protein, 9 aa, Severe Acute Respiratory Syndrome coronavirus 2 (SARS-CoV-2)
LFLAFVVFL

SEQ ID NO: 29 - protein, 9 aa, Severe Acute Respiratory Syndrome coronavirus 2 (SARS-CoV-2)
FLAFVVFLL

SEQ ID NO: 30 - protein, 9 aa, Severe Acute Respiratory Syndrome coronavirus 2 (SARS-CoV-2)
LAFVVFLLV

SEQ ID NO: 31 - protein, 9 aa, Severe Acute Respiratory Syndrome coronavirus 2 (SARS-CoV-2)
AFVVFLLVT

SEQ ID NO: 32 - protein, 9 aa, Severe Acute Respiratory Syndrome coronavirus 2 (SARS-CoV-2)
FVVFLLVTL

SEQ ID NO: 33 - protein, 9 aa, Severe Acute Respiratory Syndrome coronavirus 2 (SARS-CoV-2)
VVFLLVTLA

SEQ ID NO: 34 - protein, 9 aa, Severe Acute Respiratory Syndrome coronavirus 2 (SARS-CoV-2)
VFLLVTLAI

SEQ ID NO: 35 - protein, 9 aa, Severe Acute Respiratory Syndrome coronavirus 2 (SARS-CoV-2)
FLLVTLAIL

SEQ ID NO: 36 - protein, 9 aa, Severe Acute Respiratory Syndrome coronavirus 2 (SARS-CoV-2)
LLVTLAILT

SEQ ID NO: 37 - protein, 9 aa, Severe Acute Respiratory Syndrome coronavirus 2 (SARS-CoV-2)
LVTLAILTA

SEQ ID NO: 38 - protein, 9 aa, Severe Acute Respiratory Syndrome coronavirus 2 (SARS-CoV-2)
VTLAILTAL

SEQ ID NO: 39 - protein, 9 aa, Severe Acute Respiratory Syndrome coronavirus 2 (SARS-CoV-2)
TLAILTALR

SEQ ID NO: 40 - protein, 9 aa, Severe Acute Respiratory Syndrome coronavirus 2 (SARS-CoV-2)
LAILTALRL

SEQ ID NO: 41 - protein, 9 aa, Severe Acute Respiratory Syndrome coronavirus 2 (SARS-CoV-2)
AILTALRLC

SEQ ID NO: 42 - protein, 9 aa, Severe Acute Respiratory Syndrome coronavirus 2 (SARS-CoV-2)
ILTALRLCA

SEQ ID NO: 43 - protein, 9 aa, Severe Acute Respiratory Syndrome coronavirus 2 (SARS-CoV-2)
LTALRLCAY

SEQ ID NO: 44 - protein, 9 aa, Severe Acute Respiratory Syndrome coronavirus 2 (SARS-CoV-2)
TALRLCAYC

SEQ ID NO: 45 - protein, 9 aa, Severe Acute Respiratory Syndrome coronavirus 2 (SARS-CoV-2)
ALRLCAYCC

SEQ ID NO: 46 - protein, 30 aa, Severe Acute Respiratory Syndrome coronavirus 2 (SARS-CoV-2)
IVNVSLVKPSFYVYSRVKNLNSSRVPDLLV

SEQ ID NO: 47 - protein, 9 aa, Severe Acute Respiratory Syndrome coronavirus 2 (SARS-CoV-2)
IVNVSLVKP

SEQ ID NO: 48 - protein, 9 aa, Severe Acute Respiratory Syndrome coronavirus 2 (SARS-CoV-2)
VNVSLVKPS

SEQ ID NO: 49 - protein, 9 aa, Severe Acute Respiratory Syndrome coronavirus 2 (SARS-CoV-2)
NVSLVKPSF

SEQ ID NO: 50 - protein, 9 aa, Severe Acute Respiratory Syndrome coronavirus 2 (SARS-CoV-2)
VSLVKPSFY

SEQ ID NO: 51 - protein, 9 aa, Severe Acute Respiratory Syndrome coronavirus 2 (SARS-CoV-2)
SLVKPSFYV

SEQ ID NO: 52 - protein, 9 aa, Severe Acute Respiratory Syndrome coronavirus 2 (SARS-CoV-2)
LVKPSFYVY

SEQ ID NO: 53 - protein, 9 aa, Severe Acute Respiratory Syndrome coronavirus 2 (SARS-CoV-2)
VKPSFYVYS

SEQ ID NO: 54 - protein, 9 aa, Severe Acute Respiratory Syndrome coronavirus 2 (SARS-CoV-2)
KPSFYVYSR

SEQ ID NO: 55 - protein, 9 aa, Severe Acute Respiratory Syndrome coronavirus 2 (SARS-CoV-2)
PSFYVYSRV

SEQ ID NO: 56 - protein, 9 aa, Severe Acute Respiratory Syndrome coronavirus 2 (SARS-CoV-2)
SFYVYSRVK

SEQ ID NO: 57 - protein, 9 aa, Severe Acute Respiratory Syndrome coronavirus 2 (SARS-CoV-2)
FYVYSRVKN

SEQ ID NO: 58 - protein, 9 aa, Severe Acute Respiratory Syndrome coronavirus 2 (SARS-CoV-2)
YVYSRVKNL

SEQ ID NO: 59 - protein, 9 aa, Severe Acute Respiratory Syndrome coronavirus 2 (SARS-CoV-2)
VYSRVKNLN

SEQ ID NO: 60 - protein, 9 aa, Severe Acute Respiratory Syndrome coronavirus 2 (SARS-CoV-2)
YSRVKNLNS

SEQ ID NO: 61 - protein, 9 aa, Severe Acute Respiratory Syndrome coronavirus 2 (SARS-CoV-2)
SRVKNLNSS

SEQ ID NO: 62 - protein, 9 aa, Severe Acute Respiratory Syndrome coronavirus 2 (SARS-CoV-2)
RVKNLNSSR

SEQ ID NO: 63 - protein, 9 aa, Severe Acute Respiratory Syndrome coronavirus 2 (SARS-CoV-2)
VKNLNSSRV

SEQ ID NO: 64 - protein, 9 aa, Severe Acute Respiratory Syndrome coronavirus 2 (SARS-CoV-2)
KNLNSSRVP

SEQ ID NO: 65 - protein, 9 aa, Severe Acute Respiratory Syndrome coronavirus 2 (SARS-CoV-2)
NLNSSRVPD

SEQ ID NO: 66 - protein, 9 aa, Severe Acute Respiratory Syndrome coronavirus 2 (SARS-CoV-2)
LNSSRVPDL

SEQ ID NO: 67 - protein, 9 aa, Severe Acute Respiratory Syndrome coronavirus 2 (SARS-CoV-2)
NSSRVPDLL

SEQ ID NO: 68 - protein, 9 aa, Severe Acute Respiratory Syndrome coronavirus 2 (SARS-CoV-2)
SSRVPDLLV

SEQ ID NO: 69 - protein, 19 aa, Severe Acute Respiratory Syndrome coronavirus 2 (SARS-CoV-2)
LKKLLEQWNLVIGFLFLTW

SEQ ID NO: 70 - protein, 9 aa, Severe Acute Respiratory Syndrome coronavirus 2 (SARS-CoV-2)
LKKLLEQWN

SEQ ID NO: 71 - protein, 9 aa, Severe Acute Respiratory Syndrome coronavirus 2 (SARS-CoV-2)
KKLLEQWNL

SEQ ID NO: 72 - protein, 9 aa, Severe Acute Respiratory Syndrome coronavirus 2 (SARS-CoV-2)
KLLEQWNLV

SEQ ID NO: 73 - protein, 9 aa, Severe Acute Respiratory Syndrome coronavirus 2 (SARS-CoV-2)
LLEQWNLVI

SEQ ID NO: 74 - protein, 9 aa, Severe Acute Respiratory Syndrome coronavirus 2 (SARS-CoV-2)
LEQWNLVIG

SEQ ID NO: 75 - protein, 9 aa, Severe Acute Respiratory Syndrome coronavirus 2 (SARS-CoV-2)
EQWNLVIGF

SEQ ID NO: 76 - protein, 9 aa, Severe Acute Respiratory Syndrome coronavirus 2 (SARS-CoV-2)
QWNLVIGFL

SEQ ID NO: 77 - protein, 9 aa, Severe Acute Respiratory Syndrome coronavirus 2 (SARS-CoV-2)
WNLVIGFLF

SEQ ID NO: 78 - protein, 9 aa, Severe Acute Respiratory Syndrome coronavirus 2 (SARS-CoV-2)
NLVIGFLFL

SEQ ID NO: 79 - protein, 9 aa, Severe Acute Respiratory Syndrome coronavirus 2 (SARS-CoV-2)
LVIGFLFLT

SEQ ID NO: 80 - protein, 9 aa, Severe Acute Respiratory Syndrome coronavirus 2 (SARS-CoV-2)
VIGFLFLTW

SEQ ID NO: 81 - protein, 24 aa, Severe Acute Respiratory Syndrome coronavirus 2 (SARS-CoV-2)
GFLFLTWICLLQFAYANRNRFLYI

SEQ ID NO: 82 - protein, 9 aa, Severe Acute Respiratory Syndrome coronavirus 2 (SARS-CoV-2)
GFLFLTWIC

SEQ ID NO: 83 - protein, 9 aa, Severe Acute Respiratory Syndrome coronavirus 2 (SARS-CoV-2)
FLFLTWICL

SEQ ID NO: 84 - protein, 9 aa, Severe Acute Respiratory Syndrome coronavirus 2 (SARS-CoV-2)
LFLTWICLL

SEQ ID NO: 85 - protein, 9 aa, Severe Acute Respiratory Syndrome coronavirus 2 (SARS-CoV-2)
FLTWICLLQ

SEQ ID NO: 86 - protein, 9 aa, Severe Acute Respiratory Syndrome coronavirus 2 (SARS-CoV-2)
LTWICLLQF

SEQ ID NO: 87 - protein, 9 aa, Severe Acute Respiratory Syndrome coronavirus 2 (SARS-CoV-2)
TWICLLQFA

SEQ ID NO: 88 - protein, 9 aa, Severe Acute Respiratory Syndrome coronavirus 2 (SARS-CoV-2)
WICLLQFAY

SEQ ID NO: 89 - protein, 9 aa, Severe Acute Respiratory Syndrome coronavirus 2 (SARS-CoV-2)
ICLLQFAYA

SEQ ID NO: 90 - protein, 9 aa, Severe Acute Respiratory Syndrome coronavirus 2 (SARS-CoV-2)
CLLQFAYAN

SEQ ID NO: 91 - protein, 9 aa, Severe Acute Respiratory Syndrome coronavirus 2 (SARS-CoV-2)
LLQFAYANR

SEQ ID NO: 92 - protein, 9 aa, Severe Acute Respiratory Syndrome coronavirus 2 (SARS-CoV-2)
LQFAYANRN

SEQ ID NO: 93 - protein, 9 aa, Severe Acute Respiratory Syndrome coronavirus 2 (SARS-CoV-2)
QFAYANRNR

SEQ ID NO: 94 - protein, 9 aa, Severe Acute Respiratory Syndrome coronavirus 2 (SARS-CoV-2)
FAYANRNRF

SEQ ID NO: 95 - protein, 9 aa, Severe Acute Respiratory Syndrome coronavirus 2 (SARS-CoV-2)
AYANRNRFL

SEQ ID NO: 96 - protein, 9 aa, Severe Acute Respiratory Syndrome coronavirus 2 (SARS-CoV-2)
YANRNRFLY

SEQ ID NO: 97 - protein, 9 aa, Severe Acute Respiratory Syndrome coronavirus 2 (SARS-CoV-2)
ANRNRFLYI

SEQ ID NO: 98 - protein, 25 aa, Severe Acute Respiratory Syndrome coronavirus 2 (SARS-CoV-2)
RNRFLYIIKLIFLWLLWPVTLACFV

SEQ ID NO: 99 - protein, 9 aa, Severe Acute Respiratory Syndrome coronavirus 2 (SARS-CoV-2)
RNRFLYIIK

SEQ ID NO: 100 - protein, 9 aa, Severe Acute Respiratory Syndrome coronavirus 2 (SARS-CoV-2)
NRFLYIIKL

SEQ ID NO: 101 - protein, 9 aa, Severe Acute Respiratory Syndrome coronavirus 2 (SARS-CoV-2)
RFLYIIKLI

SEQ ID NO: 102 - protein, 9 aa, Severe Acute Respiratory Syndrome coronavirus 2 (SARS-CoV-2)
FLYIIKLIF

SEQ ID NO: 103 - protein, 9 aa, Severe Acute Respiratory Syndrome coronavirus 2 (SARS-CoV-2)
LYIIKLIFL

SEQ ID NO: 104 - protein, 9 aa, Severe Acute Respiratory Syndrome coronavirus 2 (SARS-CoV-2)
YIIKLIFLW

SEQ ID NO: 105 - protein, 9 aa, Severe Acute Respiratory Syndrome coronavirus 2 (SARS-CoV-2)
IIKLIFLWL

SEQ ID NO: 106 - protein, 9 aa, Severe Acute Respiratory Syndrome coronavirus 2 (SARS-CoV-2)
IKLIFLWLL

SEQ ID NO: 107 - protein, 9 aa, Severe Acute Respiratory Syndrome coronavirus 2 (SARS-CoV-2)
KLIFLWLLW

SEQ ID NO: 108 - protein, 9 aa, Severe Acute Respiratory Syndrome coronavirus 2 (SARS-CoV-2)
LIFLWLLWP

SEQ ID NO: 109 - protein, 9 aa, Severe Acute Respiratory Syndrome coronavirus 2 (SARS-CoV-2)
IFLWLLWPV

SEQ ID NO: 110 - protein, 9 aa, Severe Acute Respiratory Syndrome coronavirus 2 (SARS-CoV-2)
FLWLLWPVT

SEQ ID NO: 111 - protein, 9 aa, Severe Acute Respiratory Syndrome coronavirus 2 (SARS-CoV-2)
LWLLWPVTL

SEQ ID NO: 112 - protein, 9 aa, Severe Acute Respiratory Syndrome coronavirus 2 (SARS-CoV-2)
WLLWPVTLA

SEQ ID NO: 113 - protein, 9 aa, Severe Acute Respiratory Syndrome coronavirus 2 (SARS-CoV-2)
LLWPVTLAC

SEQ ID NO: 114 - protein, 9 aa, Severe Acute Respiratory Syndrome coronavirus 2 (SARS-CoV-2)
LWPVTLACF

SEQ ID NO: 115 - protein, 9 aa, Severe Acute Respiratory Syndrome coronavirus 2 (SARS-CoV-2)
WPVTLACFV

SEQ ID NO: 116 - protein, 20 aa, Severe Acute Respiratory Syndrome coronavirus 2 (SARS-CoV-2)
LWPVTLACFVLAAVYRINWI

SEQ ID NO: 117 - protein, 9 aa, Severe Acute Respiratory Syndrome coronavirus 2 (SARS-CoV-2)
LWPVTLACF

SEQ ID NO: 118 - protein, 9 aa, Severe Acute Respiratory Syndrome coronavirus 2 (SARS-CoV-2)
WPVTLACFV

SEQ ID NO: 119 - protein, 9 aa, Severe Acute Respiratory Syndrome coronavirus 2 (SARS-CoV-2)
PVTLACFVL

SEQ ID NO: 120 - protein, 9 aa, Severe Acute Respiratory Syndrome coronavirus 2 (SARS-CoV-2)
VTLACFVLA

SEQ ID NO: 121 - protein, 9 aa, Severe Acute Respiratory Syndrome coronavirus 2 (SARS-CoV-2)
TLACFVLAA

SEQ ID NO: 122 - protein, 9 aa, Severe Acute Respiratory Syndrome coronavirus 2 (SARS-CoV-2)
LACFVLAAV

SEQ ID NO: 123 - protein, 9 aa, Severe Acute Respiratory Syndrome coronavirus 2 (SARS-CoV-2)
ACFVLAAVY

SEQ ID NO: 124 - protein, 9 aa, Severe Acute Respiratory Syndrome coronavirus 2 (SARS-CoV-2)
CFVLAAVYR

SEQ ID NO: 125 - protein, 9 aa, Severe Acute Respiratory Syndrome coronavirus 2 (SARS-CoV-2)
FVLAAVYRI

SEQ ID NO: 126 - protein, 9 aa, Severe Acute Respiratory Syndrome coronavirus 2 (SARS-CoV-2)
VLAAVYRIN

SEQ ID NO: 127 - protein, 9 aa, Severe Acute Respiratory Syndrome coronavirus 2 (SARS-CoV-2)
LAAVYRINW

SEQ ID NO: 128 - protein, 9 aa, Severe Acute Respiratory Syndrome coronavirus 2 (SARS-CoV-2)
AAVYRINWI

SEQ ID NO: 129 - protein, 28 aa, Severe Acute Respiratory Syndrome coronavirus 2 (SARS-CoV-2)
LVGLMWLSYFIASFRLFARTRSMWSFNP

SEQ ID NO: 130 - protein, 9 aa, Severe Acute Respiratory Syndrome coronavirus 2 (SARS-CoV-2)
LVGLMWLSY

SEQ ID NO: 131 - protein, 9 aa, Severe Acute Respiratory Syndrome coronavirus 2 (SARS-CoV-2)
VGLMWLSYF

SEQ ID NO: 132 - protein, 9 aa, Severe Acute Respiratory Syndrome coronavirus 2 (SARS-CoV-2)
GLMWLSYFI

SEQ ID NO: 133 - protein, 9 aa, Severe Acute Respiratory Syndrome coronavirus 2 (SARS-CoV-2)
LMWLSYFIA

SEQ ID NO: 134 - protein, 9 aa, Severe Acute Respiratory Syndrome coronavirus 2 (SARS-CoV-2)
MWLSYFIAS

SEQ ID NO: 135 - protein, 9 aa, Severe Acute Respiratory Syndrome coronavirus 2 (SARS-CoV-2)
WLSYFIASF

SEQ ID NO: 136 - protein, 9 aa, Severe Acute Respiratory Syndrome coronavirus 2 (SARS-CoV-2)
LSYFIASFR

SEQ ID NO: 137 - protein, 9 aa, Severe Acute Respiratory Syndrome coronavirus 2 (SARS-CoV-2)
SYFIASFRL

SEQ ID NO: 138 - protein, 9 aa, Severe Acute Respiratory Syndrome coronavirus 2 (SARS-CoV-2)
YFIASFRLF

SEQ ID NO: 139 - protein, 9 aa, Severe Acute Respiratory Syndrome coronavirus 2 (SARS-CoV-2)
FIASFRLFA

SEQ ID NO: 140 - protein, 9 aa, Severe Acute Respiratory Syndrome coronavirus 2 (SARS-CoV-2)
IASFRLFAR

SEQ ID NO: 141 - protein, 9 aa, Severe Acute Respiratory Syndrome coronavirus 2 (SARS-CoV-2)
ASFRLFART

SEQ ID NO: 142 - protein, 9 aa, Severe Acute Respiratory Syndrome coronavirus 2 (SARS-CoV-2)
SFRLFARTR

SEQ ID NO: 143 - protein, 9 aa, Severe Acute Respiratory Syndrome coronavirus 2 (SARS-CoV-2)
FRLFARTRS

SEQ ID NO: 144 - protein, 9 aa, Severe Acute Respiratory Syndrome coronavirus 2 (SARS-CoV-2)
RLFARTRSM

SEQ ID NO: 145 - protein, 9 aa, Severe Acute Respiratory Syndrome coronavirus 2 (SARS-CoV-2)
LFARTRSMW

SEQ ID NO: 146 - protein, 9 aa, Severe Acute Respiratory Syndrome coronavirus 2 (SARS-CoV-2)
FARTRSMWS

SEQ ID NO: 147 - protein, 9 aa, Severe Acute Respiratory Syndrome coronavirus 2 (SARS-CoV-2)
ARTRSMWSF

SEQ ID NO: 148 - protein, 9 aa, Severe Acute Respiratory Syndrome coronavirus 2 (SARS-CoV-2)
RTRSMWSFN

SEQ ID NO: 149 - protein, 9 aa, Severe Acute Respiratory Syndrome coronavirus 2 (SARS-CoV-2)
TRSMWSFNP

SEQ ID NO: 150 - protein, 21 aa, Severe Acute Respiratory Syndrome coronavirus 2 (SARS-CoV-2)
MWSFNPETNILLNVPLHGTIL

SEQ ID NO: 151 - protein, 9 aa, Severe Acute Respiratory Syndrome coronavirus 2 (SARS-CoV-2)
MWSFNPETN

SEQ ID NO: 152 - protein, 9 aa, Severe Acute Respiratory Syndrome coronavirus 2 (SARS-CoV-2)
WSFNPETNI

SEQ ID NO: 153 - protein, 9 aa, Severe Acute Respiratory Syndrome coronavirus 2 (SARS-CoV-2)
SFNPETNIL

SEQ ID NO: 154 - protein, 9 aa, Severe Acute Respiratory Syndrome coronavirus 2 (SARS-CoV-2)
FNPETNILL

SEQ ID NO: 155 - protein, 9 aa, Severe Acute Respiratory Syndrome coronavirus 2 (SARS-CoV-2)
NPETNILLN

SEQ ID NO: 156 - protein, 9 aa, Severe Acute Respiratory Syndrome coronavirus 2 (SARS-CoV-2)
PETNILLNV

SEQ ID NO: 157 - protein, 9 aa, Severe Acute Respiratory Syndrome coronavirus 2 (SARS-CoV-2)
ETNILLNVP

SEQ ID NO: 158 - protein, 9 aa, Severe Acute Respiratory Syndrome coronavirus 2 (SARS-CoV-2)
TNILLNVPL

SEQ ID NO: 159 - protein, 9 aa, Severe Acute Respiratory Syndrome coronavirus 2 (SARS-CoV-2)
NILLNVPLH

SEQ ID NO: 160 - protein, 9 aa, Severe Acute Respiratory Syndrome coronavirus 2 (SARS-CoV-2)
ILLNVPLHG

SEQ ID NO: 161 - protein, 9 aa, Severe Acute Respiratory Syndrome coronavirus 2 (SARS-CoV-2)
LLNVPLHGT

SEQ ID NO: 162 - protein, 9 aa, Severe Acute Respiratory Syndrome coronavirus 2 (SARS-CoV-2)
LNVPLHGTI

SEQ ID NO: 163 - protein, 9 aa, Severe Acute Respiratory Syndrome coronavirus 2 (SARS-CoV-2)
NVPLHGTIL

SEQ ID NO: 164 - protein, 21 aa, Severe Acute Respiratory Syndrome coronavirus 2 (SARS-CoV-2)
IGAVILRGHLRIAGHHLGRCD

SEQ ID NO: 165 - protein, 9 aa, Severe Acute Respiratory Syndrome coronavirus 2 (SARS-CoV-2)
IGAVILRGH

SEQ ID NO: 166 - protein, 9 aa, Severe Acute Respiratory Syndrome coronavirus 2 (SARS-CoV-2)
GAVILRGHL

SEQ ID NO: 167 - protein, 9 aa, Severe Acute Respiratory Syndrome coronavirus 2 (SARS-CoV-2)
AVILRGHLR

SEQ ID NO: 168 - protein, 9 aa, Severe Acute Respiratory Syndrome coronavirus 2 (SARS-CoV-2)
VILRGHLRI

SEQ ID NO: 169 - protein, 9 aa, Severe Acute Respiratory Syndrome coronavirus 2 (SARS-CoV-2)
ILRGHLRIA

SEQ ID NO: 170 - protein, 9 aa, Severe Acute Respiratory Syndrome coronavirus 2 (SARS-CoV-2)
LRGHLRIAG

SEQ ID NO: 171 - protein, 9 aa, Severe Acute Respiratory Syndrome coronavirus 2 (SARS-CoV-2)
RGHLRIAGH

SEQ ID NO: 172 - protein, 9 aa, Severe Acute Respiratory Syndrome coronavirus 2 (SARS-CoV-2)
GHLRIAGHH

SEQ ID NO: 173 - protein, 9 aa, Severe Acute Respiratory Syndrome coronavirus 2 (SARS-CoV-2)
HLRIAGHHL

SEQ ID NO: 174 - protein, 9 aa, Severe Acute Respiratory Syndrome coronavirus 2 (SARS-CoV-2)
LRIAGHHLG

SEQ ID NO: 175 - protein, 9 aa, Severe Acute Respiratory Syndrome coronavirus 2 (SARS-CoV-2)
RIAGHHLGR

SEQ ID NO: 176 - protein, 9 aa, Severe Acute Respiratory Syndrome coronavirus 2 (SARS-CoV-2)
IAGHHLGRC

SEQ ID NO: 177 - protein, 9 aa, Severe Acute Respiratory Syndrome coronavirus 2 (SARS-CoV-2)
AGHHLGRCD

SEQ ID NO: 178 - protein, 17 aa, Severe Acute Respiratory Syndrome coronavirus 2 (SARS-CoV-2)
PKEITVATSRTLSYYKL

SEQ ID NO: 179 - protein, 9 aa, Severe Acute Respiratory Syndrome coronavirus 2 (SARS-CoV-2)
PKEITVATS

SEQ ID NO: 180 - protein, 9 aa, Severe Acute Respiratory Syndrome coronavirus 2 (SARS-CoV-2)
KEITVATSR

SEQ ID NO: 181 - protein, 9 aa, Severe Acute Respiratory Syndrome coronavirus 2 (SARS-CoV-2)
EITVATSRT

SEQ ID NO: 182 - protein, 9 aa, Severe Acute Respiratory Syndrome coronavirus 2 (SARS-CoV-2)
ITVATSRTL

SEQ ID NO: 183 - protein, 9 aa, Severe Acute Respiratory Syndrome coronavirus 2 (SARS-CoV-2)
TVATSRTLS

SEQ ID NO: 184 - protein, 9 aa, Severe Acute Respiratory Syndrome coronavirus 2 (SARS-CoV-2)
VATSRTLSY

SEQ ID NO: 185 - protein, 9 aa, Severe Acute Respiratory Syndrome coronavirus 2 (SARS-CoV-2)
ATSRTLSYY

SEQ ID NO: 186 - protein, 9 aa, Severe Acute Respiratory Syndrome coronavirus 2 (SARS-CoV-2)
TSRTLSYYK

SEQ ID NO: 187 - protein, 9 aa, Severe Acute Respiratory Syndrome coronavirus 2 (SARS-CoV-2)
SRTLSYYKL

SEQ ID NO: 188 - protein, 18 aa, Severe Acute Respiratory Syndrome coronavirus 2 (SARS-CoV-2)
TLSYYKLGASQRVAGDSG

SEQ ID NO: 189 - protein, 9 aa, Severe Acute Respiratory Syndrome coronavirus 2 (SARS-CoV-2)
TLSYYKLGA

SEQ ID NO: 190 - protein, 9 aa, Severe Acute Respiratory Syndrome coronavirus 2 (SARS-CoV-2)
LSYYKLGAS

SEQ ID NO: 191 - protein, 9 aa, Severe Acute Respiratory Syndrome coronavirus 2 (SARS-CoV-2)
SYYKLGASQ

SEQ ID NO: 192 - protein, 9 aa, Severe Acute Respiratory Syndrome coronavirus 2 (SARS-CoV-2)
YYKLGASQR

SEQ ID NO: 193 - protein, 9 aa, Severe Acute Respiratory Syndrome coronavirus 2 (SARS-CoV-2)
YKLGASQRV

SEQ ID NO: 194 - protein, 9 aa, Severe Acute Respiratory Syndrome coronavirus 2 (SARS-CoV-2)
KLGASQRVA

SEQ ID NO: 195 - protein, 9 aa, Severe Acute Respiratory Syndrome coronavirus 2 (SARS-CoV-2)
LGASQRVAG

SEQ ID NO: 196 - protein, 9 aa, Severe Acute Respiratory Syndrome coronavirus 2 (SARS-CoV-2)
GASQRVAGD

SEQ ID NO: 197 - protein, 9 aa, Severe Acute Respiratory Syndrome coronavirus 2 (SARS-CoV-2)
ASQRVAGDS

SEQ ID NO: 198 - protein, 9 aa, Severe Acute Respiratory Syndrome coronavirus 2 (SARS-CoV-2)
SQRVAGDSG

SEQ ID NO: 199 - protein, 22 aa, Severe Acute Respiratory Syndrome coronavirus 2 (SARS-CoV-2)
YSRYRIGNYKLNTDHSSSSDNI

SEQ ID NO: 200 - protein, 9 aa, Severe Acute Respiratory Syndrome coronavirus 2 (SARS-CoV-2)
YSRYRIGNY

SEQ ID NO: 201 - protein, 9 aa, Severe Acute Respiratory Syndrome coronavirus 2 (SARS-CoV-2)
SRYRIGNYK

SEQ ID NO: 202 - protein, 9 aa, Severe Acute Respiratory Syndrome coronavirus 2 (SARS-CoV-2)
RYRIGNYKL

SEQ ID NO: 203 - protein, 9 aa, Severe Acute Respiratory Syndrome coronavirus 2 (SARS-CoV-2)
YRIGNYKLN

SEQ ID NO: 204 - protein, 9 aa, Severe Acute Respiratory Syndrome coronavirus 2 (SARS-CoV-2)
RIGNYKLNT

SEQ ID NO: 205 - protein, 9 aa, Severe Acute Respiratory Syndrome coronavirus 2 (SARS-CoV-2)
IGNYKLNTD

SEQ ID NO: 206 - protein, 9 aa, Severe Acute Respiratory Syndrome coronavirus 2 (SARS-CoV-2)
GNYKLNTDH

SEQ ID NO: 207 - protein, 9 aa, Severe Acute Respiratory Syndrome coronavirus 2 (SARS-CoV-2)
NYKLNTDHS

SEQ ID NO: 208 - protein, 9 aa, Severe Acute Respiratory Syndrome coronavirus 2 (SARS-CoV-2)
YKLNTDHSS

SEQ ID NO: 209 - protein, 9 aa, Severe Acute Respiratory Syndrome coronavirus 2 (SARS-CoV-2)
KLNTDHSSS

SEQ ID NO: 210 - protein, 26 aa, Severe Acute Respiratory Syndrome coronavirus 2 (SARS-CoV-2)
MFVFLVLLPLVSSQCVNLTTRTQLPP

SEQ ID NO: 211 - protein, 9 aa, Severe Acute Respiratory Syndrome coronavirus 2 (SARS-CoV-2)
MFVFLVLLP

SEQ ID NO: 212 - protein, 9 aa, Severe Acute Respiratory Syndrome coronavirus 2 (SARS-CoV-2)
FVFLVLLPL

SEQ ID NO: 213 - protein, 9 aa, Severe Acute Respiratory Syndrome coronavirus 2 (SARS-CoV-2)
VFLVLLPLV

SEQ ID NO: 214 - protein, 9 aa, Severe Acute Respiratory Syndrome coronavirus 2 (SARS-CoV-2)
FLVLLPLVS

SEQ ID NO: 215 - protein, 9 aa, Severe Acute Respiratory Syndrome coronavirus 2 (SARS-CoV-2)
LVLLPLVSS

SEQ ID NO: 216 - protein, 9 aa, Severe Acute Respiratory Syndrome coronavirus 2 (SARS-CoV-2)
VLLPLVSSQ

SEQ ID NO: 217 - protein, 9 aa, Severe Acute Respiratory Syndrome coronavirus 2 (SARS-CoV-2)
LLPLVSSQC

SEQ ID NO: 218 - protein, 9 aa, Severe Acute Respiratory Syndrome coronavirus 2 (SARS-CoV-2)
LPLVSSQCV

SEQ ID NO: 219 - protein, 9 aa, Severe Acute Respiratory Syndrome coronavirus 2 (SARS-CoV-2)
PLVSSQCVN

SEQ ID NO: 220 - protein, 9 aa, Severe Acute Respiratory Syndrome coronavirus 2 (SARS-CoV-2)
LVSSQCVNL

SEQ ID NO: 221 - protein, 9 aa, Severe Acute Respiratory Syndrome coronavirus 2 (SARS-CoV-2)
VSSQCVNLT

SEQ ID NO: 222 - protein, 9 aa, Severe Acute Respiratory Syndrome coronavirus 2 (SARS-CoV-2)
SSQCVNLTT

SEQ ID NO: 223 - protein, 9 aa, Severe Acute Respiratory Syndrome coronavirus 2 (SARS-CoV-2)
SQCVNLTTR

SEQ ID NO: 224 - protein, 9 aa, Severe Acute Respiratory Syndrome coronavirus 2 (SARS-CoV-2)
QCVNLTTRT

SEQ ID NO: 225 - protein, 9 aa, Severe Acute Respiratory Syndrome coronavirus 2 (SARS-CoV-2)
CVNLTTRTQ

SEQ ID NO: 226 - protein, 9 aa, Severe Acute Respiratory Syndrome coronavirus 2 (SARS-CoV-2)
VNLTTRTQL

SEQ ID NO: 227 - protein, 9 aa, Severe Acute Respiratory Syndrome coronavirus 2 (SARS-CoV-2)
NLTTRTQLP

SEQ ID NO: 228 - protein, 9 aa, Severe Acute Respiratory Syndrome coronavirus 2 (SARS-CoV-2)
LTTRTQLPP

SEQ ID NO: 229 - protein, 15 aa, Severe Acute Respiratory Syndrome coronavirus 2 (SARS-CoV-2)
PPAYTNSFTRGVYYP

SEQ ID NO: 230 - protein, 9 aa, Severe Acute Respiratory Syndrome coronavirus 2 (SARS-CoV-2)
PPAYTNSFT

SEQ ID NO: 231 - protein, 9 aa, Severe Acute Respiratory Syndrome coronavirus 2 (SARS-CoV-2)
PAYTNSFTR

SEQ ID NO: 232 - protein, 9 aa, Severe Acute Respiratory Syndrome coronavirus 2 (SARS-CoV-2)
AYTNSFTRG

SEQ ID NO: 233 - protein, 9 aa, Severe Acute Respiratory Syndrome coronavirus 2 (SARS-CoV-2)
YTNSFTRGV

SEQ ID NO: 234 - protein, 9 aa, Severe Acute Respiratory Syndrome coronavirus 2 (SARS-CoV-2)
TNSFTRGVY

SEQ ID NO: 235 - protein, 9 aa, Severe Acute Respiratory Syndrome coronavirus 2 (SARS-CoV-2)
NSFTRGVYY

SEQ ID NO: 236 - protein, 9 aa, Severe Acute Respiratory Syndrome coronavirus 2 (SARS-CoV-2)
SFTRGVYYP

SEQ ID NO: 237 - protein, 21 aa, Severe Acute Respiratory Syndrome coronavirus 2 (SARS-CoV-2)
PDKVFRSSVLHSTQDLFLPFF

SEQ ID NO: 238 - protein, 9 aa, Severe Acute Respiratory Syndrome coronavirus 2 (SARS-CoV-2)
PDKVFRSSV

SEQ ID NO: 239 - protein, 9 aa, Severe Acute Respiratory Syndrome coronavirus 2 (SARS-CoV-2)
DKVFRSSVL

SEQ ID NO: 240 - protein, 9 aa, Severe Acute Respiratory Syndrome coronavirus 2 (SARS-CoV-2)
KVFRSSVLH

SEQ ID NO: 241 - protein, 9 aa, Severe Acute Respiratory Syndrome coronavirus 2 (SARS-CoV-2)
VFRSSVLHS

SEQ ID NO: 242 - protein, 9 aa, Severe Acute Respiratory Syndrome coronavirus 2 (SARS-CoV-2)
FRSSVLHST

SEQ ID NO: 243 - protein, 9 aa, Severe Acute Respiratory Syndrome coronavirus 2 (SARS-CoV-2)
RSSVLHSTQ

SEQ ID NO: 244 - protein, 9 aa, Severe Acute Respiratory Syndrome coronavirus 2 (SARS-CoV-2)
SSVLHSTQD

SEQ ID NO: 245 - protein, 9 aa, Severe Acute Respiratory Syndrome coronavirus 2 (SARS-CoV-2)
SVLHSTQDL

SEQ ID NO: 246 - protein, 9 aa, Severe Acute Respiratory Syndrome coronavirus 2 (SARS-CoV-2)
VLHSTQDLF

SEQ ID NO: 247 - protein, 9 aa, Severe Acute Respiratory Syndrome coronavirus 2 (SARS-CoV-2)
LHSTQDLFL

SEQ ID NO: 248 - protein, 9 aa, Severe Acute Respiratory Syndrome coronavirus 2 (SARS-CoV-2)
HSTQDLFLP

SEQ ID NO: 249 - protein, 9 aa, Severe Acute Respiratory Syndrome coronavirus 2 (SARS-CoV-2)
STQDLFLPF

SEQ ID NO: 250 - protein, 9 aa, Severe Acute Respiratory Syndrome coronavirus 2 (SARS-CoV-2)
TQDLFLPFF

SEQ ID NO: 251 - protein, 18 aa, Severe Acute Respiratory Syndrome coronavirus 2 (SARS-CoV-2)
QDLFLPFFSNVTWFHAIH

SEQ ID NO: 252 - protein, 9 aa, Severe Acute Respiratory Syndrome coronavirus 2 (SARS-CoV-2)
QDLFLPFFS

SEQ ID NO: 253 - protein, 9 aa, Severe Acute Respiratory Syndrome coronavirus 2 (SARS-CoV-2)
DLFLPFFSN

SEQ ID NO: 254 - protein, 9 aa, Severe Acute Respiratory Syndrome coronavirus 2 (SARS-CoV-2)
LFLPFFSNV

SEQ ID NO: 255 - protein, 9 aa, Severe Acute Respiratory Syndrome coronavirus 2 (SARS-CoV-2)
FLPFFSNVT

SEQ ID NO: 256 - protein, 9 aa, Severe Acute Respiratory Syndrome coronavirus 2 (SARS-CoV-2)
LPFFSNVTW

SEQ ID NO: 257 - protein, 9 aa, Severe Acute Respiratory Syndrome coronavirus 2 (SARS-CoV-2)
PFFSNVTWF

SEQ ID NO: 258 - protein, 9 aa, Severe Acute Respiratory Syndrome coronavirus 2 (SARS-CoV-2)
FFSNVTWFH

SEQ ID NO: 259 - protein, 9 aa, Severe Acute Respiratory Syndrome coronavirus 2 (SARS-CoV-2)
FSNVTWFHA

SEQ ID NO: 260 - protein, 9 aa, Severe Acute Respiratory Syndrome coronavirus 2 (SARS-CoV-2)
SNVTWFHAI

SEQ ID NO: 261 - protein, 9 aa, Severe Acute Respiratory Syndrome coronavirus 2 (SARS-CoV-2)
NVTWFHAIH

SEQ ID NO: 262 - protein, 19 aa, Severe Acute Respiratory Syndrome coronavirus 2 (SARS-CoV-2)
NVTWFHAIHVSGTNGTKRF

SEQ ID NO: 263 - protein, 9 aa, Severe Acute Respiratory Syndrome coronavirus 2 (SARS-CoV-2)
NVTWFHAIH

SEQ ID NO: 264 - protein, 9 aa, Severe Acute Respiratory Syndrome coronavirus 2 (SARS-CoV-2)
VTWFHAIHV

SEQ ID NO: 265 - protein, 9 aa, Severe Acute Respiratory Syndrome coronavirus 2 (SARS-CoV-2)
TWFHAIHVS

SEQ ID NO: 266 - protein, 9 aa, Severe Acute Respiratory Syndrome coronavirus 2 (SARS-CoV-2)
WFHAIHVSG

SEQ ID NO: 267 - protein, 9 aa, Severe Acute Respiratory Syndrome coronavirus 2 (SARS-CoV-2)
FHAIHVSGT

SEQ ID NO: 268 - protein, 9 aa, Severe Acute Respiratory Syndrome coronavirus 2 (SARS-CoV-2)
HAIHVSGTN

SEQ ID NO: 269 - protein, 9 aa, Severe Acute Respiratory Syndrome coronavirus 2 (SARS-CoV-2)
AIHVSGTNG

SEQ ID NO: 270 - protein, 9 aa, Severe Acute Respiratory Syndrome coronavirus 2 (SARS-CoV-2)
IHVSGTNGT

SEQ ID NO: 271 - protein, 9 aa, Severe Acute Respiratory Syndrome coronavirus 2 (SARS-CoV-2)
HVSGTNGTK

SEQ ID NO: 272 - protein, 9 aa, Severe Acute Respiratory Syndrome coronavirus 2 (SARS-CoV-2)
VSGTNGTKR

SEQ ID NO: 273 - protein, 9 aa, Severe Acute Respiratory Syndrome coronavirus 2 (SARS-CoV-2)
SGTNGTKRF

SEQ ID NO: 274 - protein, 17 aa, Severe Acute Respiratory Syndrome coronavirus 2 (SARS-CoV-2)
NDGVYFASTEKSNIIRG

SEQ ID NO: 275 - protein, 9 aa, Severe Acute Respiratory Syndrome coronavirus 2 (SARS-CoV-2)
NDGVYFAST

SEQ ID NO: 276 - protein, 9 aa, Severe Acute Respiratory Syndrome coronavirus 2 (SARS-CoV-2)
DGVYFASTE

SEQ ID NO: 277 - protein, 9 aa, Severe Acute Respiratory Syndrome coronavirus 2 (SARS-CoV-2)
GVYFASTEK

SEQ ID NO: 278 - protein, 9 aa, Severe Acute Respiratory Syndrome coronavirus 2 (SARS-CoV-2)
VYFASTEKS

SEQ ID NO: 279 - protein, 9 aa, Severe Acute Respiratory Syndrome coronavirus 2 (SARS-CoV-2)
YFASTEKSN

SEQ ID NO: 280 - protein, 9 aa, Severe Acute Respiratory Syndrome coronavirus 2 (SARS-CoV-2)
FASTEKSNI

SEQ ID NO: 281 - protein, 9 aa, Severe Acute Respiratory Syndrome coronavirus 2 (SARS-CoV-2)
ASTEKSNII

SEQ ID NO: 282 - protein, 9 aa, Severe Acute Respiratory Syndrome coronavirus 2 (SARS-CoV-2)
STEKSNIIR

SEQ ID NO: 283 - protein, 9 aa, Severe Acute Respiratory Syndrome coronavirus 2 (SARS-CoV-2)
TEKSNIIRG

SEQ ID NO: 284 - protein, 19 aa, Severe Acute Respiratory Syndrome coronavirus 2 (SARS-CoV-2)
KTQSLLIVNNATNVVIKVC

SEQ ID NO: 285 - protein, 9 aa, Severe Acute Respiratory Syndrome coronavirus 2 (SARS-CoV-2)
KTQSLLIVN

SEQ ID NO: 286 - protein, 9 aa, Severe Acute Respiratory Syndrome coronavirus 2 (SARS-CoV-2)
TQSLLIVNN

SEQ ID NO: 287 - protein, 9 aa, Severe Acute Respiratory Syndrome coronavirus 2 (SARS-CoV-2)
QSLLIVNNA

SEQ ID NO: 288 - protein, 9 aa, Severe Acute Respiratory Syndrome coronavirus 2 (SARS-CoV-2)
SLLIVNNAT

SEQ ID NO: 289 - protein, 9 aa, Severe Acute Respiratory Syndrome coronavirus 2 (SARS-CoV-2)
LLIVNNATN

SEQ ID NO: 290 - protein, 9 aa, Severe Acute Respiratory Syndrome coronavirus 2 (SARS-CoV-2)
LIVNNATNV

SEQ ID NO: 291 - protein, 9 aa, Severe Acute Respiratory Syndrome coronavirus 2 (SARS-CoV-2)
IVNNATNVV

SEQ ID NO: 292 - protein, 9 aa, Severe Acute Respiratory Syndrome coronavirus 2 (SARS-CoV-2)
VNNATNVVI

SEQ ID NO: 293 - protein, 9 aa, Severe Acute Respiratory Syndrome coronavirus 2 (SARS-CoV-2)
NNATNVVIK

SEQ ID NO: 294 - protein, 9 aa, Severe Acute Respiratory Syndrome coronavirus 2 (SARS-CoV-2)
NATNVVIKV

SEQ ID NO: 295 - protein, 9 aa, Severe Acute Respiratory Syndrome coronavirus 2 (SARS-CoV-2)
ATNVVIKVC

SEQ ID NO: 296 - protein, 20 aa, Severe Acute Respiratory Syndrome coronavirus 2 (SARS-CoV-2)
NDPFLGVYYHKNNKSWMESE

SEQ ID NO: 297 - protein, 9 aa, Severe Acute Respiratory Syndrome coronavirus 2 (SARS-CoV-2)
NDPFLGVYY

SEQ ID NO: 298 - protein, 9 aa, Severe Acute Respiratory Syndrome coronavirus 2 (SARS-CoV-2)
DPFLGVYYH

SEQ ID NO: 299 - protein, 9 aa, Severe Acute Respiratory Syndrome coronavirus 2 (SARS-CoV-2)
PFLGVYYHK

SEQ ID NO: 300 - protein, 9 aa, Severe Acute Respiratory Syndrome coronavirus 2 (SARS-CoV-2)
FLGVYYHKN

SEQ ID NO: 301 - protein, 9 aa, Severe Acute Respiratory Syndrome coronavirus 2 (SARS-CoV-2)
LGVYYHKNN

SEQ ID NO: 302 - protein, 9 aa, Severe Acute Respiratory Syndrome coronavirus 2 (SARS-CoV-2)
GVYYHKNNK

SEQ ID NO: 303 - protein, 9 aa, Severe Acute Respiratory Syndrome coronavirus 2 (SARS-CoV-2)
VYYHKNNKS

SEQ ID NO: 304 - protein, 9 aa, Severe Acute Respiratory Syndrome coronavirus 2 (SARS-CoV-2)
YYHKNNKSW

SEQ ID NO: 305 - protein, 9 aa, Severe Acute Respiratory Syndrome coronavirus 2 (SARS-CoV-2)
YHKNNKSWM

SEQ ID NO: 306 - protein, 9 aa, Severe Acute Respiratory Syndrome coronavirus 2 (SARS-CoV-2)
HKNNKSWME

SEQ ID NO: 307 - protein, 9 aa, Severe Acute Respiratory Syndrome coronavirus 2 (SARS-CoV-2)
KNNKSWMES

SEQ ID NO: 308 - protein, 9 aa, Severe Acute Respiratory Syndrome coronavirus 2 (SARS-CoV-2)
NNKSWMESE

SEQ ID NO: 309 - protein, 18 aa, Severe Acute Respiratory Syndrome coronavirus 2 (SARS-CoV-2)
ESEFRVYSSANNCTFEYV

SEQ ID NO: 310 - protein, 9 aa, Severe Acute Respiratory Syndrome coronavirus 2 (SARS-CoV-2)
ESEFRVYSS

SEQ ID NO: 311 - protein, 9 aa, Severe Acute Respiratory Syndrome coronavirus 2 (SARS-CoV-2)
SEFRVYSSA

SEQ ID NO: 312 - protein, 9 aa, Severe Acute Respiratory Syndrome coronavirus 2 (SARS-CoV-2)
EFRVYSSAN

SEQ ID NO: 313 - protein, 9 aa, Severe Acute Respiratory Syndrome coronavirus 2 (SARS-CoV-2)
FRVYSSANN

SEQ ID NO: 314 - protein, 9 aa, Severe Acute Respiratory Syndrome coronavirus 2 (SARS-CoV-2)
RVYSSANNC

SEQ ID NO: 315 - protein, 9 aa, Severe Acute Respiratory Syndrome coronavirus 2 (SARS-CoV-2)
VYSSANNCT

SEQ ID NO: 316 - protein, 9 aa, Severe Acute Respiratory Syndrome coronavirus 2 (SARS-CoV-2)
YSSANNCTF

SEQ ID NO: 317 - protein, 9 aa, Severe Acute Respiratory Syndrome coronavirus 2 (SARS-CoV-2)
SSANNCTFE

SEQ ID NO: 318 - protein, 9 aa, Severe Acute Respiratory Syndrome coronavirus 2 (SARS-CoV-2)
SANNCTFEY

SEQ ID NO: 319 - protein, 9 aa, Severe Acute Respiratory Syndrome coronavirus 2 (SARS-CoV-2)
ANNCTFEYV

SEQ ID NO: 320 - protein, 19 aa, Severe Acute Respiratory Syndrome coronavirus 2 (SARS-CoV-2)
IDGYFKIYSKHTPINLVRD

SEQ ID NO: 321 - protein, 9 aa, Severe Acute Respiratory Syndrome coronavirus 2 (SARS-CoV-2)
IDGYFKIYS

SEQ ID NO: 322 - protein, 9 aa, Severe Acute Respiratory Syndrome coronavirus 2 (SARS-CoV-2)
DGYFKIYSK

SEQ ID NO: 323 - protein, 9 aa, Severe Acute Respiratory Syndrome coronavirus 2 (SARS-CoV-2)
GYFKIYSKH

SEQ ID NO: 324 - protein, 9 aa, Severe Acute Respiratory Syndrome coronavirus 2 (SARS-CoV-2)
YFKIYSKHT

SEQ ID NO: 325 - protein, 9 aa, Severe Acute Respiratory Syndrome coronavirus 2 (SARS-CoV-2)
FKIYSKHTP

SEQ ID NO: 326 - protein, 9 aa, Severe Acute Respiratory Syndrome coronavirus 2 (SARS-CoV-2)
KIYSKHTPI

SEQ ID NO: 327 - protein, 9 aa, Severe Acute Respiratory Syndrome coronavirus 2 (SARS-CoV-2)
IYSKHTPIN

SEQ ID NO: 328 - protein, 9 aa, Severe Acute Respiratory Syndrome coronavirus 2 (SARS-CoV-2)
YSKHTPINL

SEQ ID NO: 329 - protein, 9 aa, Severe Acute Respiratory Syndrome coronavirus 2 (SARS-CoV-2)
SKHTPINLV

SEQ ID NO: 330 - protein, 9 aa, Severe Acute Respiratory Syndrome coronavirus 2 (SARS-CoV-2)
KHTPINLVR

SEQ ID NO: 331 - protein, 9 aa, Severe Acute Respiratory Syndrome coronavirus 2 (SARS-CoV-2)
HTPINLVRD

SEQ ID NO: 332 - protein, 17 aa, Severe Acute Respiratory Syndrome coronavirus 2 (SARS-CoV-2)
HTPINLVRDLPQGFSAL

SEQ ID NO: 333 - protein, 9 aa, Severe Acute Respiratory Syndrome coronavirus 2 (SARS-CoV-2)
HTPINLVRD

SEQ ID NO: 334 - protein, 9 aa, Severe Acute Respiratory Syndrome coronavirus 2 (SARS-CoV-2)
TPINLVRDL

SEQ ID NO: 335 - protein, 9 aa, Severe Acute Respiratory Syndrome coronavirus 2 (SARS-CoV-2)
PINLVRDLP

SEQ ID NO: 336 - protein, 9 aa, Severe Acute Respiratory Syndrome coronavirus 2 (SARS-CoV-2)
INLVRDLPQ

SEQ ID NO: 337 - protein, 9 aa, Severe Acute Respiratory Syndrome coronavirus 2 (SARS-CoV-2)
NLVRDLPQG

SEQ ID NO: 338 - protein, 9 aa, Severe Acute Respiratory Syndrome coronavirus 2 (SARS-CoV-2)
LVRDLPQGF

SEQ ID NO: 339 - protein, 9 aa, Severe Acute Respiratory Syndrome coronavirus 2 (SARS-CoV-2)
VRDLPQGFS

SEQ ID NO: 340 - protein, 9 aa, Severe Acute Respiratory Syndrome coronavirus 2 (SARS-CoV-2)
RDLPQGFSA

SEQ ID NO: 341 - protein, 9 aa, Severe Acute Respiratory Syndrome coronavirus 2 (SARS-CoV-2)
DLPQGFSAL

SEQ ID NO: 342 - protein, 24 aa, Severe Acute Respiratory Syndrome coronavirus 2 (SARS-CoV-2)
GINITRFQTLLALHRSYLTPGDSS

SEQ ID NO: 343 - protein, 9 aa, Severe Acute Respiratory Syndrome coronavirus 2 (SARS-CoV-2)
GINITRFQT

SEQ ID NO: 344 - protein, 9 aa, Severe Acute Respiratory Syndrome coronavirus 2 (SARS-CoV-2)
INITRFQTL

SEQ ID NO: 345 - protein, 9 aa, Severe Acute Respiratory Syndrome coronavirus 2 (SARS-CoV-2)
NITRFQTLL

SEQ ID NO: 346 - protein, 9 aa, Severe Acute Respiratory Syndrome coronavirus 2 (SARS-CoV-2)
ITRFQTLLA

SEQ ID NO: 347 - protein, 9 aa, Severe Acute Respiratory Syndrome coronavirus 2 (SARS-CoV-2)
TRFQTLLAL

SEQ ID NO: 348 - protein, 9 aa, Severe Acute Respiratory Syndrome coronavirus 2 (SARS-CoV-2)
RFQTLLALH

SEQ ID NO: 349 - protein, 9 aa, Severe Acute Respiratory Syndrome coronavirus 2 (SARS-CoV-2)
FQTLLALHR

SEQ ID NO: 350 - protein, 9 aa, Severe Acute Respiratory Syndrome coronavirus 2 (SARS-CoV-2)
QTLLALHRS

SEQ ID NO: 351 - protein, 9 aa, Severe Acute Respiratory Syndrome coronavirus 2 (SARS-CoV-2)
TLLALHRSY

SEQ ID NO: 352 - protein, 9 aa, Severe Acute Respiratory Syndrome coronavirus 2 (SARS-CoV-2)
LLALHRSYL

SEQ ID NO: 353 - protein, 9 aa, Severe Acute Respiratory Syndrome coronavirus 2 (SARS-CoV-2)
LALHRSYLT

SEQ ID NO: 354 - protein, 9 aa, Severe Acute Respiratory Syndrome coronavirus 2 (SARS-CoV-2)
ALHRSYLTP

SEQ ID NO: 355 - protein, 9 aa, Severe Acute Respiratory Syndrome coronavirus 2 (SARS-CoV-2)
LHRSYLTPG

SEQ ID NO: 356 - protein, 9 aa, Severe Acute Respiratory Syndrome coronavirus 2 (SARS-CoV-2)
HRSYLTPGD

SEQ ID NO: 357 - protein, 9 aa, Severe Acute Respiratory Syndrome coronavirus 2 (SARS-CoV-2)
RSYLTPGDS

SEQ ID NO: 358 - protein, 9 aa, Severe Acute Respiratory Syndrome coronavirus 2 (SARS-CoV-2)
SYLTPGDSS

SEQ ID NO: 359 - protein, 23 aa, Severe Acute Respiratory Syndrome coronavirus 2 (SARS-CoV-2)
YVGYLQPRTFLLKYNENGTITDA

SEQ ID NO: 360 - protein, 9 aa, Severe Acute Respiratory Syndrome coronavirus 2 (SARS-CoV-2)
YVGYLQPRT

SEQ ID NO: 361 - protein, 9 aa, Severe Acute Respiratory Syndrome coronavirus 2 (SARS-CoV-2)
VGYLQPRTF

SEQ ID NO: 362 - protein, 9 aa, Severe Acute Respiratory Syndrome coronavirus 2 (SARS-CoV-2)
GYLQPRTFL

SEQ ID NO: 363 - protein, 9 aa, Severe Acute Respiratory Syndrome coronavirus 2 (SARS-CoV-2)
YLQPRTFLL

SEQ ID NO: 364 - protein, 9 aa, Severe Acute Respiratory Syndrome coronavirus 2 (SARS-CoV-2)
LQPRTFLLK

SEQ ID NO: 365 - protein, 9 aa, Severe Acute Respiratory Syndrome coronavirus 2 (SARS-CoV-2)
QPRTFLLKY

SEQ ID NO: 366 - protein, 9 aa, Severe Acute Respiratory Syndrome coronavirus 2 (SARS-CoV-2)
PRTFLLKYN

SEQ ID NO: 367 - protein, 9 aa, Severe Acute Respiratory Syndrome coronavirus 2 (SARS-CoV-2)
RTFLLKYNE

SEQ ID NO: 368 - protein, 9 aa, Severe Acute Respiratory Syndrome coronavirus 2 (SARS-CoV-2)
TFLLKYNEN

SEQ ID NO: 369 - protein, 9 aa, Severe Acute Respiratory Syndrome coronavirus 2 (SARS-CoV-2)
FLLKYNENG

SEQ ID NO: 370 - protein, 9 aa, Severe Acute Respiratory Syndrome coronavirus 2 (SARS-CoV-2)
LLKYNENGT

SEQ ID NO: 371 - protein, 9 aa, Severe Acute Respiratory Syndrome coronavirus 2 (SARS-CoV-2)
LKYNENGTI

SEQ ID NO: 372 - protein, 9 aa, Severe Acute Respiratory Syndrome coronavirus 2 (SARS-CoV-2)
KYNENGTIT

SEQ ID NO: 373 - protein, 9 aa, Severe Acute Respiratory Syndrome coronavirus 2 (SARS-CoV-2)
YNENGTITD

SEQ ID NO: 374 - protein, 9 aa, Severe Acute Respiratory Syndrome coronavirus 2 (SARS-CoV-2)
NENGTITDA

SEQ ID NO: 375 - protein, 21 aa, Severe Acute Respiratory Syndrome coronavirus 2 (SARS-CoV-2)
EKGIYQTSNFRVQPTESIVRF

SEQ ID NO: 376 - protein, 9 aa, Severe Acute Respiratory Syndrome coronavirus 2 (SARS-CoV-2)
EKGIYQTSN

SEQ ID NO: 377 - protein, 9 aa, Severe Acute Respiratory Syndrome coronavirus 2 (SARS-CoV-2)
KGIYQTSNF

SEQ ID NO: 378 - protein, 9 aa, Severe Acute Respiratory Syndrome coronavirus 2 (SARS-CoV-2)
GIYQTSNFR

SEQ ID NO: 379 - protein, 9 aa, Severe Acute Respiratory Syndrome coronavirus 2 (SARS-CoV-2)
IYQTSNFRV

SEQ ID NO: 380 - protein, 9 aa, Severe Acute Respiratory Syndrome coronavirus 2 (SARS-CoV-2)
YQTSNFRVQ

SEQ ID NO: 381 - protein, 9 aa, Severe Acute Respiratory Syndrome coronavirus 2 (SARS-CoV-2)
QTSNFRVQP

SEQ ID NO: 382 - protein, 9 aa, Severe Acute Respiratory Syndrome coronavirus 2 (SARS-CoV-2)
TSNFRVQPT

SEQ ID NO: 383 - protein, 9 aa, Severe Acute Respiratory Syndrome coronavirus 2 (SARS-CoV-2)
SNFRVQPTE

SEQ ID NO: 384 - protein, 9 aa, Severe Acute Respiratory Syndrome coronavirus 2 (SARS-CoV-2)
NFRVQPTES

SEQ ID NO: 385 - protein, 9 aa, Severe Acute Respiratory Syndrome coronavirus 2 (SARS-CoV-2)
FRVQPTESI

SEQ ID NO: 386 - protein, 9 aa, Severe Acute Respiratory Syndrome coronavirus 2 (SARS-CoV-2)
RVQPTESIV

SEQ ID NO: 387 - protein, 9 aa, Severe Acute Respiratory Syndrome coronavirus 2 (SARS-CoV-2)
VQPTESIVR

SEQ ID NO: 388 - protein, 9 aa, Severe Acute Respiratory Syndrome coronavirus 2 (SARS-CoV-2)
QPTESIVRF

SEQ ID NO: 389 - protein, 19 aa, Severe Acute Respiratory Syndrome coronavirus 2 (SARS-CoV-2)
LCPFGEVFNATRFASVYAW

SEQ ID NO: 390 - protein, 9 aa, Severe Acute Respiratory Syndrome coronavirus 2 (SARS-CoV-2)
LCPFGEVFN

SEQ ID NO: 391 - protein, 9 aa, Severe Acute Respiratory Syndrome coronavirus 2 (SARS-CoV-2)
CPFGEVFNA

SEQ ID NO: 392 - protein, 9 aa, Severe Acute Respiratory Syndrome coronavirus 2 (SARS-CoV-2)
PFGEVFNAT

SEQ ID NO: 393 - protein, 9 aa, Severe Acute Respiratory Syndrome coronavirus 2 (SARS-CoV-2)
FGEVFNATR

SEQ ID NO: 394 - protein, 9 aa, Severe Acute Respiratory Syndrome coronavirus 2 (SARS-CoV-2)
GEVFNATRF

SEQ ID NO: 395 - protein, 9 aa, Severe Acute Respiratory Syndrome coronavirus 2 (SARS-CoV-2)
EVFNATRFA

SEQ ID NO: 396 - protein, 9 aa, Severe Acute Respiratory Syndrome coronavirus 2 (SARS-CoV-2)
VFNATRFAS

SEQ ID NO: 397 - protein, 9 aa, Severe Acute Respiratory Syndrome coronavirus 2 (SARS-CoV-2)
FNATRFASV

SEQ ID NO: 398 - protein, 9 aa, Severe Acute Respiratory Syndrome coronavirus 2 (SARS-CoV-2)
NATRFASVY

SEQ ID NO: 399 - protein, 9 aa, Severe Acute Respiratory Syndrome coronavirus 2 (SARS-CoV-2)
ATRFASVYA

SEQ ID NO: 400 - protein, 9 aa, Severe Acute Respiratory Syndrome coronavirus 2 (SARS-CoV-2)
TRFASVYAW

SEQ ID NO: 401 - protein, 18 aa, Severe Acute Respiratory Syndrome coronavirus 2 (SARS-CoV-2)
FASVYAWNRKRISNCVAD

SEQ ID NO: 402 - protein, 9 aa, Severe Acute Respiratory Syndrome coronavirus 2 (SARS-CoV-2)
FASVYAWNR

SEQ ID NO: 403 - protein, 9 aa, Severe Acute Respiratory Syndrome coronavirus 2 (SARS-CoV-2)
ASVYAWNRK

SEQ ID NO: 404 - protein, 9 aa, Severe Acute Respiratory Syndrome coronavirus 2 (SARS-CoV-2)
SVYAWNRKR

SEQ ID NO: 405 - protein, 9 aa, Severe Acute Respiratory Syndrome coronavirus 2 (SARS-CoV-2)
VYAWNRKRI

SEQ ID NO: 406 - protein, 9 aa, Severe Acute Respiratory Syndrome coronavirus 2 (SARS-CoV-2)
YAWNRKRIS

SEQ ID NO: 407 - protein, 9 aa, Severe Acute Respiratory Syndrome coronavirus 2 (SARS-CoV-2)
AWNRKRISN

SEQ ID NO: 408 - protein, 9 aa, Severe Acute Respiratory Syndrome coronavirus 2 (SARS-CoV-2)
WNRKRISNC

SEQ ID NO: 409 - protein, 9 aa, Severe Acute Respiratory Syndrome coronavirus 2 (SARS-CoV-2)
NRKRISNCV

SEQ ID NO: 410 - protein, 9 aa, Severe Acute Respiratory Syndrome coronavirus 2 (SARS-CoV-2)
RKRISNCVA

SEQ ID NO: 411 - protein, 9 aa, Severe Acute Respiratory Syndrome coronavirus 2 (SARS-CoV-2)
KRISNCVAD

SEQ ID NO: 412 - protein, 19 aa, Severe Acute Respiratory Syndrome coronavirus 2 (SARS-CoV-2)
VADYSVLYNSASFSTFKCY

SEQ ID NO: 413 - protein, 9 aa, Severe Acute Respiratory Syndrome coronavirus 2 (SARS-CoV-2)
VADYSVLYN

SEQ ID NO: 414 - protein, 9 aa, Severe Acute Respiratory Syndrome coronavirus 2 (SARS-CoV-2)
ADYSVLYNS

SEQ ID NO: 415 - protein, 9 aa, Severe Acute Respiratory Syndrome coronavirus 2 (SARS-CoV-2)
DYSVLYNSA

SEQ ID NO: 416 - protein, 9 aa, Severe Acute Respiratory Syndrome coronavirus 2 (SARS-CoV-2)
YSVLYNSAS

SEQ ID NO: 417 - protein, 9 aa, Severe Acute Respiratory Syndrome coronavirus 2 (SARS-CoV-2)
SVLYNSASF

SEQ ID NO: 418 - protein, 9 aa, Severe Acute Respiratory Syndrome coronavirus 2 (SARS-CoV-2)
VLYNSASFS

SEQ ID NO: 419 - protein, 9 aa, Severe Acute Respiratory Syndrome coronavirus 2 (SARS-CoV-2)
LYNSASFST

SEQ ID NO: 420 - protein, 9 aa, Severe Acute Respiratory Syndrome coronavirus 2 (SARS-CoV-2)
YNSASFSTF

SEQ ID NO: 421 - protein, 9 aa, Severe Acute Respiratory Syndrome coronavirus 2 (SARS-CoV-2)
NSASFSTFK

SEQ ID NO: 422 - protein, 9 aa, Severe Acute Respiratory Syndrome coronavirus 2 (SARS-CoV-2)
SASFSTFKC

SEQ ID NO: 423 - protein, 9 aa, Severe Acute Respiratory Syndrome coronavirus 2 (SARS-CoV-2)
ASFSTFKCY

SEQ ID NO: 424 - protein, 27 aa, Severe Acute Respiratory Syndrome coronavirus 2 (SARS-CoV-2)
DSKVGGNYNYLYRLFRKSNLKPFERDI

SEQ ID NO: 425 - protein, 9 aa, Severe Acute Respiratory Syndrome coronavirus 2 (SARS-CoV-2)
DSKVGGNYN

SEQ ID NO: 426 - protein, 9 aa, Severe Acute Respiratory Syndrome coronavirus 2 (SARS-CoV-2)
SKVGGNYNY

SEQ ID NO: 427 - protein, 9 aa, Severe Acute Respiratory Syndrome coronavirus 2 (SARS-CoV-2)
KVGGNYNYL

SEQ ID NO: 428 - protein, 9 aa, Severe Acute Respiratory Syndrome coronavirus 2 (SARS-CoV-2)
VGGNYNYLY

SEQ ID NO: 429 - protein, 9 aa, Severe Acute Respiratory Syndrome coronavirus 2 (SARS-CoV-2)
GGNYNYLYR

SEQ ID NO: 430 - protein, 9 aa, Severe Acute Respiratory Syndrome coronavirus 2 (SARS-CoV-2)
GNYNYLYRL

SEQ ID NO: 431 - protein, 9 aa, Severe Acute Respiratory Syndrome coronavirus 2 (SARS-CoV-2)
NYNYLYRLF

SEQ ID NO: 432 - protein, 9 aa, Severe Acute Respiratory Syndrome coronavirus 2 (SARS-CoV-2)
YNYLYRLFR

SEQ ID NO: 433 - protein, 9 aa, Severe Acute Respiratory Syndrome coronavirus 2 (SARS-CoV-2)
NYLYRLFRK

SEQ ID NO: 434 - protein, 9 aa, Severe Acute Respiratory Syndrome coronavirus 2 (SARS-CoV-2)
YLYRLFRKS

SEQ ID NO: 435 - protein, 9 aa, Severe Acute Respiratory Syndrome coronavirus 2 (SARS-CoV-2)
LYRLFRKSN

SEQ ID NO: 436 - protein, 9 aa, Severe Acute Respiratory Syndrome coronavirus 2 (SARS-CoV-2)
YRLFRKSNL

SEQ ID NO: 437 - protein, 9 aa, Severe Acute Respiratory Syndrome coronavirus 2 (SARS-CoV-2)
RLFRKSNLK

SEQ ID NO: 438 - protein, 9 aa, Severe Acute Respiratory Syndrome coronavirus 2 (SARS-CoV-2)
LFRKSNLKP

SEQ ID NO: 439 - protein, 9 aa, Severe Acute Respiratory Syndrome coronavirus 2 (SARS-CoV-2)
FRKSNLKPF

SEQ ID NO: 440 - protein, 9 aa, Severe Acute Respiratory Syndrome coronavirus 2 (SARS-CoV-2)
RKSNLKPFE

SEQ ID NO: 441 - protein, 9 aa, Severe Acute Respiratory Syndrome coronavirus 2 (SARS-CoV-2)
KSNLKPFER

SEQ ID NO: 442 - protein, 9 aa, Severe Acute Respiratory Syndrome coronavirus 2 (SARS-CoV-2)
SNLKPFERD

SEQ ID NO: 443 - protein, 9 aa, Severe Acute Respiratory Syndrome coronavirus 2 (SARS-CoV-2)
NLKPFERDI

SEQ ID NO: 444 - protein, 18 aa, Severe Acute Respiratory Syndrome coronavirus 2 (SARS-CoV-2)
VEGFNCYFPLQSYGFQPT

SEQ ID NO: 445 - protein, 9 aa, Severe Acute Respiratory Syndrome coronavirus 2 (SARS-CoV-2)
VEGFNCYFP

SEQ ID NO: 446 - protein, 9 aa, Severe Acute Respiratory Syndrome coronavirus 2 (SARS-CoV-2)
EGFNCYFPL

SEQ ID NO: 447 - protein, 9 aa, Severe Acute Respiratory Syndrome coronavirus 2 (SARS-CoV-2)
GFNCYFPLQ

SEQ ID NO: 448 - protein, 9 aa, Severe Acute Respiratory Syndrome coronavirus 2 (SARS-CoV-2)
FNCYFPLQS

SEQ ID NO: 449 - protein, 9 aa, Severe Acute Respiratory Syndrome coronavirus 2 (SARS-CoV-2)
NCYFPLQSY

SEQ ID NO: 450 - protein, 9 aa, Severe Acute Respiratory Syndrome coronavirus 2 (SARS-CoV-2)
CYFPLQSYG

SEQ ID NO: 451 - protein, 9 aa, Severe Acute Respiratory Syndrome coronavirus 2 (SARS-CoV-2)
YFPLQSYGF

SEQ ID NO: 452 - protein, 9 aa, Severe Acute Respiratory Syndrome coronavirus 2 (SARS-CoV-2)
FPLQSYGFQ

SEQ ID NO: 453 - protein, 9 aa, Severe Acute Respiratory Syndrome coronavirus 2 (SARS-CoV-2)
PLQSYGFQP

SEQ ID NO: 454 - protein, 9 aa, Severe Acute Respiratory Syndrome coronavirus 2 (SARS-CoV-2)
LQSYGFQPT

SEQ ID NO: 455 - protein, 17 aa, Severe Acute Respiratory Syndrome coronavirus 2 (SARS-CoV-2)
LQSYGFQPTNGVGYQPY

SEQ ID NO: 456 - protein, 9 aa, Severe Acute Respiratory Syndrome coronavirus 2 (SARS-CoV-2)
LQSYGFQPT

SEQ ID NO: 457 - protein, 9 aa, Severe Acute Respiratory Syndrome coronavirus 2 (SARS-CoV-2)
QSYGFQPTN

SEQ ID NO: 458 - protein, 9 aa, Severe Acute Respiratory Syndrome coronavirus 2 (SARS-CoV-2)
SYGFQPTNG

SEQ ID NO: 459 - protein, 9 aa, Severe Acute Respiratory Syndrome coronavirus 2 (SARS-CoV-2)
YGFQPTNGV

SEQ ID NO: 460 - protein, 9 aa, Severe Acute Respiratory Syndrome coronavirus 2 (SARS-CoV-2)
GFQPTNGVG

SEQ ID NO: 461 - protein, 9 aa, Severe Acute Respiratory Syndrome coronavirus 2 (SARS-CoV-2)
FQPTNGVGY

SEQ ID NO: 462 - protein, 9 aa, Severe Acute Respiratory Syndrome coronavirus 2 (SARS-CoV-2)
QPTNGVGYQ

SEQ ID NO: 463 - protein, 9 aa, Severe Acute Respiratory Syndrome coronavirus 2 (SARS-CoV-2)
PTNGVGYQP

SEQ ID NO: 464 - protein, 9 aa, Severe Acute Respiratory Syndrome coronavirus 2 (SARS-CoV-2)
TNGVGYQPY

SEQ ID NO: 465 - protein, 22 aa, Severe Acute Respiratory Syndrome coronavirus 2 (SARS-CoV-2)
YRVVVLSFELLHAPATVCGPKK

SEQ ID NO: 466 - protein, 9 aa, Severe Acute Respiratory Syndrome coronavirus 2 (SARS-CoV-2)
YRVVVLSFE

SEQ ID NO: 467 - protein, 9 aa, Severe Acute Respiratory Syndrome coronavirus 2 (SARS-CoV-2)
RVVVLSFEL

SEQ ID NO: 468 - protein, 9 aa, Severe Acute Respiratory Syndrome coronavirus 2 (SARS-CoV-2)
VVVLSFELL

SEQ ID NO: 469 - protein, 9 aa, Severe Acute Respiratory Syndrome coronavirus 2 (SARS-CoV-2)
VVLSFELLH

SEQ ID NO: 470 - protein, 9 aa, Severe Acute Respiratory Syndrome coronavirus 2 (SARS-CoV-2)
VLSFELLHA

SEQ ID NO: 471 - protein, 9 aa, Severe Acute Respiratory Syndrome coronavirus 2 (SARS-CoV-2)
LSFELLHAP

SEQ ID NO: 472 - protein, 9 aa, Severe Acute Respiratory Syndrome coronavirus 2 (SARS-CoV-2)
SFELLHAPA

SEQ ID NO: 473 - protein, 9 aa, Severe Acute Respiratory Syndrome coronavirus 2 (SARS-CoV-2)
FELLHAPAT

SEQ ID NO: 474 - protein, 9 aa, Severe Acute Respiratory Syndrome coronavirus 2 (SARS-CoV-2)
ELLHAPATV

SEQ ID NO: 475 - protein, 9 aa, Severe Acute Respiratory Syndrome coronavirus 2 (SARS-CoV-2)
LLHAPATVC

SEQ ID NO: 476 - protein, 9 aa, Severe Acute Respiratory Syndrome coronavirus 2 (SARS-CoV-2)
LHAPATVCG

SEQ ID NO: 477 - protein, 9 aa, Severe Acute Respiratory Syndrome coronavirus 2 (SARS-CoV-2)
HAPATVCGP

SEQ ID NO: 478 - protein, 9 aa, Severe Acute Respiratory Syndrome coronavirus 2 (SARS-CoV-2)
APATVCGPK

SEQ ID NO: 479 - protein, 9 aa, Severe Acute Respiratory Syndrome coronavirus 2 (SARS-CoV-2)
PATVCGPKK

SEQ ID NO: 480 - protein, 19 aa, Severe Acute Respiratory Syndrome coronavirus 2 (SARS-CoV-2)
NKCVNFNFNGLTGTGVLTE

SEQ ID NO: 481 - protein, 9 aa, Severe Acute Respiratory Syndrome coronavirus 2 (SARS-CoV-2)
NKCVNFNFN

SEQ ID NO: 482 - protein, 9 aa, Severe Acute Respiratory Syndrome coronavirus 2 (SARS-CoV-2)
KCVNFNFNG

SEQ ID NO: 483 - protein, 9 aa, Severe Acute Respiratory Syndrome coronavirus 2 (SARS-CoV-2)
CVNFNFNGL

SEQ ID NO: 484 - protein, 9 aa, Severe Acute Respiratory Syndrome coronavirus 2 (SARS-CoV-2)
VNFNFNGLT

SEQ ID NO: 485 - protein, 9 aa, Severe Acute Respiratory Syndrome coronavirus 2 (SARS-CoV-2)
NFNFNGLTG

SEQ ID NO: 486 - protein, 9 aa, Severe Acute Respiratory Syndrome coronavirus 2 (SARS-CoV-2)
FNFNGLTGT

SEQ ID NO: 487 - protein, 9 aa, Severe Acute Respiratory Syndrome coronavirus 2 (SARS-CoV-2)
NFNGLTGTG

SEQ ID NO: 488 - protein, 9 aa, Severe Acute Respiratory Syndrome coronavirus 2 (SARS-CoV-2)
FNGLTGTGV

SEQ ID NO: 489 - protein, 9 aa, Severe Acute Respiratory Syndrome coronavirus 2 (SARS-CoV-2)
NGLTGTGVL

SEQ ID NO: 490 - protein, 9 aa, Severe Acute Respiratory Syndrome coronavirus 2 (SARS-CoV-2)
GLTGTGVLT

SEQ ID NO: 491 - protein, 9 aa, Severe Acute Respiratory Syndrome coronavirus 2 (SARS-CoV-2)
LTGTGVLTE

SEQ ID NO: 492 - protein, 15 aa, Severe Acute Respiratory Syndrome coronavirus 2 (SARS-CoV-2)
PTNFTISVTTEILPV

SEQ ID NO: 493 - protein, 9 aa, Severe Acute Respiratory Syndrome coronavirus 2 (SARS-CoV-2)
PTNFTISVT

SEQ ID NO: 494 - protein, 9 aa, Severe Acute Respiratory Syndrome coronavirus 2 (SARS-CoV-2)
TNFTISVTT

SEQ ID NO: 495 - protein, 9 aa, Severe Acute Respiratory Syndrome coronavirus 2 (SARS-CoV-2)
NFTISVTTE

SEQ ID NO: 496 - protein, 9 aa, Severe Acute Respiratory Syndrome coronavirus 2 (SARS-CoV-2)
FTISVTTEI

SEQ ID NO: 497 - protein, 9 aa, Severe Acute Respiratory Syndrome coronavirus 2 (SARS-CoV-2)
TISVTTEIL

SEQ ID NO: 498 - protein, 9 aa, Severe Acute Respiratory Syndrome coronavirus 2 (SARS-CoV-2)
ISVTTEILP

SEQ ID NO: 499 - protein, 9 aa, Severe Acute Respiratory Syndrome coronavirus 2 (SARS-CoV-2)
SVTTEILPV

SEQ ID NO: 500 - protein, 26 aa, Severe Acute Respiratory Syndrome coronavirus 2 (SARS-CoV-2)
CSNLLLQYGSFCTQLNRALTGIAVEQ

SEQ ID NO: 501 - protein, 9 aa, Severe Acute Respiratory Syndrome coronavirus 2 (SARS-CoV-2)
CSNLLLQYG

SEQ ID NO: 502 - protein, 9 aa, Severe Acute Respiratory Syndrome coronavirus 2 (SARS-CoV-2)
SNLLLQYGS

SEQ ID NO: 503 - protein, 9 aa, Severe Acute Respiratory Syndrome coronavirus 2 (SARS-CoV-2)
NLLLQYGSF

SEQ ID NO: 504 - protein, 9 aa, Severe Acute Respiratory Syndrome coronavirus 2 (SARS-CoV-2)
LLLQYGSFC

SEQ ID NO: 505 - protein, 9 aa, Severe Acute Respiratory Syndrome coronavirus 2 (SARS-CoV-2)
LLQYGSFCT

SEQ ID NO: 506 - protein, 9 aa, Severe Acute Respiratory Syndrome coronavirus 2 (SARS-CoV-2)
LQYGSFCTQ

SEQ ID NO: 507 - protein, 9 aa, Severe Acute Respiratory Syndrome coronavirus 2 (SARS-CoV-2)
QYGSFCTQL

SEQ ID NO: 508 - protein, 9 aa, Severe Acute Respiratory Syndrome coronavirus 2 (SARS-CoV-2)
YGSFCTQLN

SEQ ID NO: 509 - protein, 9 aa, Severe Acute Respiratory Syndrome coronavirus 2 (SARS-CoV-2)
GSFCTQLNR

SEQ ID NO: 510 - protein, 9 aa, Severe Acute Respiratory Syndrome coronavirus 2 (SARS-CoV-2)
SFCTQLNRA

SEQ ID NO: 511 - protein, 9 aa, Severe Acute Respiratory Syndrome coronavirus 2 (SARS-CoV-2)
FCTQLNRAL

SEQ ID NO: 512 - protein, 9 aa, Severe Acute Respiratory Syndrome coronavirus 2 (SARS-CoV-2)
CTQLNRALT

SEQ ID NO: 513 - protein, 9 aa, Severe Acute Respiratory Syndrome coronavirus 2 (SARS-CoV-2)
TQLNRALTG

SEQ ID NO: 514 - protein, 9 aa, Severe Acute Respiratory Syndrome coronavirus 2 (SARS-CoV-2)
QLNRALTGI

SEQ ID NO: 515 - protein, 9 aa, Severe Acute Respiratory Syndrome coronavirus 2 (SARS-CoV-2)
LNRALTGIA

SEQ ID NO: 516 - protein, 9 aa, Severe Acute Respiratory Syndrome coronavirus 2 (SARS-CoV-2)
NRALTGIAV

SEQ ID NO: 517 - protein, 9 aa, Severe Acute Respiratory Syndrome coronavirus 2 (SARS-CoV-2)
RALTGIAVE

SEQ ID NO: 518 - protein, 9 aa, Severe Acute Respiratory Syndrome coronavirus 2 (SARS-CoV-2)
ALTGIAVEQ

SEQ ID NO: 519 - protein, 20 aa, Severe Acute Respiratory Syndrome coronavirus 2 (SARS-CoV-2)
FGGFNFSQILPDPSKPSKRS

SEQ ID NO: 520 - protein, 9 aa, Severe Acute Respiratory Syndrome coronavirus 2 (SARS-CoV-2)
FGGFNFSQI

SEQ ID NO: 521 - protein, 9 aa, Severe Acute Respiratory Syndrome coronavirus 2 (SARS-CoV-2)
GGFNFSQIL

SEQ ID NO: 522 - protein, 9 aa, Severe Acute Respiratory Syndrome coronavirus 2 (SARS-CoV-2)
GFNFSQILP

SEQ ID NO: 523 - protein, 9 aa, Severe Acute Respiratory Syndrome coronavirus 2 (SARS-CoV-2)
FNFSQILPD

SEQ ID NO: 524 - protein, 9 aa, Severe Acute Respiratory Syndrome coronavirus 2 (SARS-CoV-2)
NFSQILPDP

SEQ ID NO: 525 - protein, 9 aa, Severe Acute Respiratory Syndrome coronavirus 2 (SARS-CoV-2)
FSQILPDPS

SEQ ID NO: 526 - protein, 9 aa, Severe Acute Respiratory Syndrome coronavirus 2 (SARS-CoV-2)
SQILPDPSK

SEQ ID NO: 527 - protein, 9 aa, Severe Acute Respiratory Syndrome coronavirus 2 (SARS-CoV-2)
QILPDPSKP

SEQ ID NO: 528 - protein, 9 aa, Severe Acute Respiratory Syndrome coronavirus 2 (SARS-CoV-2)
ILPDPSKPS

SEQ ID NO: 529 - protein, 9 aa, Severe Acute Respiratory Syndrome coronavirus 2 (SARS-CoV-2)
LPDPSKPSK

SEQ ID NO: 530 - protein, 9 aa, Severe Acute Respiratory Syndrome coronavirus 2 (SARS-CoV-2)
PDPSKPSKR

SEQ ID NO: 531 - protein, 9 aa, Severe Acute Respiratory Syndrome coronavirus 2 (SARS-CoV-2)
DPSKPSKRS

SEQ ID NO: 532 - protein, 20 aa, Severe Acute Respiratory Syndrome coronavirus 2 (SARS-CoV-2)
IEDLLFNKVTLADAGFIKQY

SEQ ID NO: 533 - protein, 9 aa, Severe Acute Respiratory Syndrome coronavirus 2 (SARS-CoV-2)
IEDLLFNKV

SEQ ID NO: 534 - protein, 9 aa, Severe Acute Respiratory Syndrome coronavirus 2 (SARS-CoV-2)
EDLLFNKVT

SEQ ID NO: 535 - protein, 9 aa, Severe Acute Respiratory Syndrome coronavirus 2 (SARS-CoV-2)
DLLFNKVTL

SEQ ID NO: 536 - protein, 9 aa, Severe Acute Respiratory Syndrome coronavirus 2 (SARS-CoV-2)
LLFNKVTLA

SEQ ID NO: 537 - protein, 9 aa, Severe Acute Respiratory Syndrome coronavirus 2 (SARS-CoV-2)
LFNKVTLAD

SEQ ID NO: 538 - protein, 9 aa, Severe Acute Respiratory Syndrome coronavirus 2 (SARS-CoV-2)
FNKVTLADA

SEQ ID NO: 539 - protein, 9 aa, Severe Acute Respiratory Syndrome coronavirus 2 (SARS-CoV-2)
NKVTLADAG

SEQ ID NO: 540 - protein, 9 aa, Severe Acute Respiratory Syndrome coronavirus 2 (SARS-CoV-2)
KVTLADAGF

SEQ ID NO: 541 - protein, 9 aa, Severe Acute Respiratory Syndrome coronavirus 2 (SARS-CoV-2)
VTLADAGFI

SEQ ID NO: 542 - protein, 9 aa, Severe Acute Respiratory Syndrome coronavirus 2 (SARS-CoV-2)
TLADAGFIK

SEQ ID NO: 543 - protein, 9 aa, Severe Acute Respiratory Syndrome coronavirus 2 (SARS-CoV-2)
LADAGFIKQ

SEQ ID NO: 544 - protein, 9 aa, Severe Acute Respiratory Syndrome coronavirus 2 (SARS-CoV-2)
ADAGFIKQY

SEQ ID NO: 545 - protein, 18 aa, Severe Acute Respiratory Syndrome coronavirus 2 (SARS-CoV-2)
AQKFNGLTVLPPLLTDEM

SEQ ID NO: 546 - protein, 9 aa, Severe Acute Respiratory Syndrome coronavirus 2 (SARS-CoV-2)
AQKFNGLTV

SEQ ID NO: 547 - protein, 9 aa, Severe Acute Respiratory Syndrome coronavirus 2 (SARS-CoV-2)
QKFNGLTVL

SEQ ID NO: 548 - protein, 9 aa, Severe Acute Respiratory Syndrome coronavirus 2 (SARS-CoV-2)
KFNGLTVLP

SEQ ID NO: 549 - protein, 9 aa, Severe Acute Respiratory Syndrome coronavirus 2 (SARS-CoV-2)
FNGLTVLPP

SEQ ID NO: 550 - protein, 9 aa, Severe Acute Respiratory Syndrome coronavirus 2 (SARS-CoV-2)
NGLTVLPPL

SEQ ID NO: 551 - protein, 9 aa, Severe Acute Respiratory Syndrome coronavirus 2 (SARS-CoV-2)
GLTVLPPLL

SEQ ID NO: 552 - protein, 9 aa, Severe Acute Respiratory Syndrome coronavirus 2 (SARS-CoV-2)
LTVLPPLLT

SEQ ID NO: 553 - protein, 9 aa, Severe Acute Respiratory Syndrome coronavirus 2 (SARS-CoV-2)
TVLPPLLTD

SEQ ID NO: 554 - protein, 9 aa, Severe Acute Respiratory Syndrome coronavirus 2 (SARS-CoV-2)
VLPPLLTDE

SEQ ID NO: 555 - protein, 9 aa, Severe Acute Respiratory Syndrome coronavirus 2 (SARS-CoV-2)
LPPLLTDEM

SEQ ID NO: 556 - protein, 19 aa, Severe Acute Respiratory Syndrome coronavirus 2 (SARS-CoV-2)
TDEMIAQYTSALLAGTITS

SEQ ID NO: 557 - protein, 9 aa, Severe Acute Respiratory Syndrome coronavirus 2 (SARS-CoV-2)
TDEMIAQYT

SEQ ID NO: 558 - protein, 9 aa, Severe Acute Respiratory Syndrome coronavirus 2 (SARS-CoV-2)
DEMIAQYTS

SEQ ID NO: 559 - protein, 9 aa, Severe Acute Respiratory Syndrome coronavirus 2 (SARS-CoV-2)
EMIAQYTSA

SEQ ID NO: 560 - protein, 9 aa, Severe Acute Respiratory Syndrome coronavirus 2 (SARS-CoV-2)
MIAQYTSAL

SEQ ID NO: 561 - protein, 9 aa, Severe Acute Respiratory Syndrome coronavirus 2 (SARS-CoV-2)
IAQYTSALL

SEQ ID NO: 562 - protein, 9 aa, Severe Acute Respiratory Syndrome coronavirus 2 (SARS-CoV-2)
AQYTSALLA

SEQ ID NO: 563 - protein, 9 aa, Severe Acute Respiratory Syndrome coronavirus 2 (SARS-CoV-2)
QYTSALLAG

SEQ ID NO: 564 - protein, 9 aa, Severe Acute Respiratory Syndrome coronavirus 2 (SARS-CoV-2)
YTSALLAGT

SEQ ID NO: 565 - protein, 9 aa, Severe Acute Respiratory Syndrome coronavirus 2 (SARS-CoV-2)
TSALLAGTI

SEQ ID NO: 566 - protein, 9 aa, Severe Acute Respiratory Syndrome coronavirus 2 (SARS-CoV-2)
SALLAGTIT

SEQ ID NO: 567 - protein, 9 aa, Severe Acute Respiratory Syndrome coronavirus 2 (SARS-CoV-2)
ALLAGTITS

SEQ ID NO: 568 - protein, 17 aa, Severe Acute Respiratory Syndrome coronavirus 2 (SARS-CoV-2)
QIPFAMQMAYRFNGIGV

SEQ ID NO: 569 - protein, 9 aa, Severe Acute Respiratory Syndrome coronavirus 2 (SARS-CoV-2)
QIPFAMQMA

SEQ ID NO: 570 - protein, 9 aa, Severe Acute Respiratory Syndrome coronavirus 2 (SARS-CoV-2)
IPFAMQMAY

SEQ ID NO: 571 - protein, 9 aa, Severe Acute Respiratory Syndrome coronavirus 2 (SARS-CoV-2)
PFAMQMAYR

SEQ ID NO: 572 - protein, 9 aa, Severe Acute Respiratory Syndrome coronavirus 2 (SARS-CoV-2)
FAMQMAYRF

SEQ ID NO: 573 - protein, 9 aa, Severe Acute Respiratory Syndrome coronavirus 2 (SARS-CoV-2)
AMQMAYRFN

SEQ ID NO: 574 - protein, 9 aa, Severe Acute Respiratory Syndrome coronavirus 2 (SARS-CoV-2)
MQMAYRFNG

SEQ ID NO: 575 - protein, 9 aa, Severe Acute Respiratory Syndrome coronavirus 2 (SARS-CoV-2)
QMAYRFNGI

SEQ ID NO: 576 - protein, 9 aa, Severe Acute Respiratory Syndrome coronavirus 2 (SARS-CoV-2)
MAYRFNGIG

SEQ ID NO: 577 - protein, 9 aa, Severe Acute Respiratory Syndrome coronavirus 2 (SARS-CoV-2)
AYRFNGIGV

SEQ ID NO: 578 - protein, 27 aa, Severe Acute Respiratory Syndrome coronavirus 2 (SARS-CoV-2)
NQKLIANQFNSAIGKIQDSLSSTASAL

SEQ ID NO: 579 - protein, 9 aa, Severe Acute Respiratory Syndrome coronavirus 2 (SARS-CoV-2)
NQKLIANQF

SEQ ID NO: 580 - protein, 9 aa, Severe Acute Respiratory Syndrome coronavirus 2 (SARS-CoV-2)
QKLIANQFN

SEQ ID NO: 581 - protein, 9 aa, Severe Acute Respiratory Syndrome coronavirus 2 (SARS-CoV-2)
KLIANQFNS

SEQ ID NO: 582 - protein, 9 aa, Severe Acute Respiratory Syndrome coronavirus 2 (SARS-CoV-2)
LIANQFNSA

SEQ ID NO: 583 - protein, 9 aa, Severe Acute Respiratory Syndrome coronavirus 2 (SARS-CoV-2)
IANQFNSAI

SEQ ID NO: 584 - protein, 9 aa, Severe Acute Respiratory Syndrome coronavirus 2 (SARS-CoV-2)
ANQFNSAIG

SEQ ID NO: 585 - protein, 9 aa, Severe Acute Respiratory Syndrome coronavirus 2 (SARS-CoV-2)
NQFNSAIGK

SEQ ID NO: 586 - protein, 9 aa, Severe Acute Respiratory Syndrome coronavirus 2 (SARS-CoV-2)
QFNSAIGKI

SEQ ID NO: 587 - protein, 9 aa, Severe Acute Respiratory Syndrome coronavirus 2 (SARS-CoV-2)
FNSAIGKIQ

SEQ ID NO: 588 - protein, 9 aa, Severe Acute Respiratory Syndrome coronavirus 2 (SARS-CoV-2)
NSAIGKIQD

SEQ ID NO: 589 - protein, 9 aa, Severe Acute Respiratory Syndrome coronavirus 2 (SARS-CoV-2)
SAIGKIQDS

SEQ ID NO: 590 - protein, 9 aa, Severe Acute Respiratory Syndrome coronavirus 2 (SARS-CoV-2)
AIGKIQDSL

SEQ ID NO: 591 - protein, 9 aa, Severe Acute Respiratory Syndrome coronavirus 2 (SARS-CoV-2)
IGKIQDSLS

SEQ ID NO: 592 - protein, 9 aa, Severe Acute Respiratory Syndrome coronavirus 2 (SARS-CoV-2)
GKIQDSLSS

SEQ ID NO: 593 - protein, 9 aa, Severe Acute Respiratory Syndrome coronavirus 2 (SARS-CoV-2)
KIQDSLSST

SEQ ID NO: 594 - protein, 9 aa, Severe Acute Respiratory Syndrome coronavirus 2 (SARS-CoV-2)
IQDSLSSTA

SEQ ID NO: 595 - protein, 9 aa, Severe Acute Respiratory Syndrome coronavirus 2 (SARS-CoV-2)
QDSLSSTAS

SEQ ID NO: 596 - protein, 9 aa, Severe Acute Respiratory Syndrome coronavirus 2 (SARS-CoV-2)
DSLSSTASA

SEQ ID NO: 597 - protein, 9 aa, Severe Acute Respiratory Syndrome coronavirus 2 (SARS-CoV-2)
SLSSTASAL

SEQ ID NO: 598 - protein, 16 aa, Severe Acute Respiratory Syndrome coronavirus 2 (SARS-CoV-2)
IQDSLSSTASALGKLQ

SEQ ID NO: 599 - protein, 9 aa, Severe Acute Respiratory Syndrome coronavirus 2 (SARS-CoV-2)
IQDSLSSTA

SEQ ID NO: 600 - protein, 9 aa, Severe Acute Respiratory Syndrome coronavirus 2 (SARS-CoV-2)
QDSLSSTAS

SEQ ID NO: 601 - protein, 9 aa, Severe Acute Respiratory Syndrome coronavirus 2 (SARS-CoV-2)
DSLSSTASA

SEQ ID NO: 602 - protein, 9 aa, Severe Acute Respiratory Syndrome coronavirus 2 (SARS-CoV-2)
SLSSTASAL

SEQ ID NO: 603 - protein, 9 aa, Severe Acute Respiratory Syndrome coronavirus 2 (SARS-CoV-2)
LSSTASALG

SEQ ID NO: 604 - protein, 9 aa, Severe Acute Respiratory Syndrome coronavirus 2 (SARS-CoV-2)
SSTASALGK

SEQ ID NO: 605 - protein, 9 aa, Severe Acute Respiratory Syndrome coronavirus 2 (SARS-CoV-2)
STASALGKL

SEQ ID NO: 606 - protein, 9 aa, Severe Acute Respiratory Syndrome coronavirus 2 (SARS-CoV-2)
TASALGKLQ

SEQ ID NO: 607 - protein, 26 aa, Severe Acute Respiratory Syndrome coronavirus 2 (SARS-CoV-2)
AQALNTLVKQLSSNFGAISSVLNDIL

SEQ ID NO: 608 - protein, 9 aa, Severe Acute Respiratory Syndrome coronavirus 2 (SARS-CoV-2)
AQALNTLVK

SEQ ID NO: 609 - protein, 9 aa, Severe Acute Respiratory Syndrome coronavirus 2 (SARS-CoV-2)
QALNTLVKQ

SEQ ID NO: 610 - protein, 9 aa, Severe Acute Respiratory Syndrome coronavirus 2 (SARS-CoV-2)
ALNTLVKQL

SEQ ID NO: 611 - protein, 9 aa, Severe Acute Respiratory Syndrome coronavirus 2 (SARS-CoV-2)
LNTLVKQLS

SEQ ID NO: 612 - protein, 9 aa, Severe Acute Respiratory Syndrome coronavirus 2 (SARS-CoV-2)
NTLVKQLSS

SEQ ID NO: 613 - protein, 9 aa, Severe Acute Respiratory Syndrome coronavirus 2 (SARS-CoV-2)
TLVKQLSSN

SEQ ID NO: 614 - protein, 9 aa, Severe Acute Respiratory Syndrome coronavirus 2 (SARS-CoV-2)
LVKQLSSNF

SEQ ID NO: 615 - protein, 9 aa, Severe Acute Respiratory Syndrome coronavirus 2 (SARS-CoV-2)
VKQLSSNFG

SEQ ID NO: 616 - protein, 9 aa, Severe Acute Respiratory Syndrome coronavirus 2 (SARS-CoV-2)
KQLSSNFGA

SEQ ID NO: 617 - protein, 9 aa, Severe Acute Respiratory Syndrome coronavirus 2 (SARS-CoV-2)
QLSSNFGAI

SEQ ID NO: 618 - protein, 9 aa, Severe Acute Respiratory Syndrome coronavirus 2 (SARS-CoV-2)
LSSNFGAIS

SEQ ID NO: 619 - protein, 9 aa, Severe Acute Respiratory Syndrome coronavirus 2 (SARS-CoV-2)
SSNFGAISS

SEQ ID NO: 620 - protein, 9 aa, Severe Acute Respiratory Syndrome coronavirus 2 (SARS-CoV-2)
SNFGAISSV

SEQ ID NO: 621 - protein, 9 aa, Severe Acute Respiratory Syndrome coronavirus 2 (SARS-CoV-2)
NFGAISSVL

SEQ ID NO: 622 - protein, 9 aa, Severe Acute Respiratory Syndrome coronavirus 2 (SARS-CoV-2)
FGAISSVLN

SEQ ID NO: 623 - protein, 9 aa, Severe Acute Respiratory Syndrome coronavirus 2 (SARS-CoV-2)
GAISSVLND

SEQ ID NO: 624 - protein, 9 aa, Severe Acute Respiratory Syndrome coronavirus 2 (SARS-CoV-2)
AISSVLNDI

SEQ ID NO: 625 - protein, 9 aa, Severe Acute Respiratory Syndrome coronavirus 2 (SARS-CoV-2)
ISSVLNDIL

SEQ ID NO: 626 - protein, 23 aa, Severe Acute Respiratory Syndrome coronavirus 2 (SARS-CoV-2)
EVQIDRLITGRLQSLQTYVTQQL

SEQ ID NO: 627 - protein, 9 aa, Severe Acute Respiratory Syndrome coronavirus 2 (SARS-CoV-2)
EVQIDRLIT

SEQ ID NO: 628 - protein, 9 aa, Severe Acute Respiratory Syndrome coronavirus 2 (SARS-CoV-2)
VQIDRLITG

SEQ ID NO: 629 - protein, 9 aa, Severe Acute Respiratory Syndrome coronavirus 2 (SARS-CoV-2)
QIDRLITGR

SEQ ID NO: 630 - protein, 9 aa, Severe Acute Respiratory Syndrome coronavirus 2 (SARS-CoV-2)
IDRLITGRL

SEQ ID NO: 631 - protein, 9 aa, Severe Acute Respiratory Syndrome coronavirus 2 (SARS-CoV-2)
DRLITGRLQ

SEQ ID NO: 632 - protein, 9 aa, Severe Acute Respiratory Syndrome coronavirus 2 (SARS-CoV-2)
RLITGRLQS

SEQ ID NO: 633 - protein, 9 aa, Severe Acute Respiratory Syndrome coronavirus 2 (SARS-CoV-2)
LITGRLQSL

SEQ ID NO: 634 - protein, 9 aa, Severe Acute Respiratory Syndrome coronavirus 2 (SARS-CoV-2)
ITGRLQSLQ

SEQ ID NO: 635 - protein, 9 aa, Severe Acute Respiratory Syndrome coronavirus 2 (SARS-CoV-2)
TGRLQSLQT

SEQ ID NO: 636 - protein, 9 aa, Severe Acute Respiratory Syndrome coronavirus 2 (SARS-CoV-2)
GRLQSLQTY

SEQ ID NO: 637 - protein, 9 aa, Severe Acute Respiratory Syndrome coronavirus 2 (SARS-CoV-2)
RLQSLQTYV

SEQ ID NO: 638 - protein, 9 aa, Severe Acute Respiratory Syndrome coronavirus 2 (SARS-CoV-2)
LQSLQTYVT

SEQ ID NO: 639 - protein, 9 aa, Severe Acute Respiratory Syndrome coronavirus 2 (SARS-CoV-2)
QSLQTYVTQ

SEQ ID NO: 640 - protein, 9 aa, Severe Acute Respiratory Syndrome coronavirus 2 (SARS-CoV-2)
SLQTYVTQQ

SEQ ID NO: 641 - protein, 9 aa, Severe Acute Respiratory Syndrome coronavirus 2 (SARS-CoV-2)
LQTYVTQQL

SEQ ID NO: 642 - protein, 20 aa, Severe Acute Respiratory Syndrome coronavirus 2 (SARS-CoV-2)
QQLIRAAEIRASANLAATKM

SEQ ID NO: 643 - protein, 9 aa, Severe Acute Respiratory Syndrome coronavirus 2 (SARS-CoV-2)
QQLIRAAEI

SEQ ID NO: 644 - protein, 9 aa, Severe Acute Respiratory Syndrome coronavirus 2 (SARS-CoV-2)
QLIRAAEIR

SEQ ID NO: 645 - protein, 9 aa, Severe Acute Respiratory Syndrome coronavirus 2 (SARS-CoV-2)
LIRAAEIRA

SEQ ID NO: 646 - protein, 9 aa, Severe Acute Respiratory Syndrome coronavirus 2 (SARS-CoV-2)
IRAAEIRAS

SEQ ID NO: 647 - protein, 9 aa, Severe Acute Respiratory Syndrome coronavirus 2 (SARS-CoV-2)
RAAEIRASA

SEQ ID NO: 648 - protein, 9 aa, Severe Acute Respiratory Syndrome coronavirus 2 (SARS-CoV-2)
AAEIRASAN

SEQ ID NO: 649 - protein, 9 aa, Severe Acute Respiratory Syndrome coronavirus 2 (SARS-CoV-2)
AEIRASANL

SEQ ID NO: 650 - protein, 9 aa, Severe Acute Respiratory Syndrome coronavirus 2 (SARS-CoV-2)
EIRASANLA

SEQ ID NO: 651 - protein, 9 aa, Severe Acute Respiratory Syndrome coronavirus 2 (SARS-CoV-2)
IRASANLAA

SEQ ID NO: 652 - protein, 9 aa, Severe Acute Respiratory Syndrome coronavirus 2 (SARS-CoV-2)
RASANLAAT

SEQ ID NO: 653 - protein, 9 aa, Severe Acute Respiratory Syndrome coronavirus 2 (SARS-CoV-2)
ASANLAATK

SEQ ID NO: 654 - protein, 9 aa, Severe Acute Respiratory Syndrome coronavirus 2 (SARS-CoV-2)
SANLAATKM

SEQ ID NO: 655 - protein, 20 aa, Severe Acute Respiratory Syndrome coronavirus 2 (SARS-CoV-2)
GKGYHLMSFPQSAPHGVVFL

SEQ ID NO: 656 - protein, 9 aa, Severe Acute Respiratory Syndrome coronavirus 2 (SARS-CoV-2)
GKGYHLMSF

SEQ ID NO: 657 - protein, 9 aa, Severe Acute Respiratory Syndrome coronavirus 2 (SARS-CoV-2)
KGYHLMSFP

SEQ ID NO: 658 - protein, 9 aa, Severe Acute Respiratory Syndrome coronavirus 2 (SARS-CoV-2)
GYHLMSFPQ

SEQ ID NO: 659 - protein, 9 aa, Severe Acute Respiratory Syndrome coronavirus 2 (SARS-CoV-2)
YHLMSFPQS

SEQ ID NO: 660 - protein, 9 aa, Severe Acute Respiratory Syndrome coronavirus 2 (SARS-CoV-2)
HLMSFPQSA

SEQ ID NO: 661 - protein, 9 aa, Severe Acute Respiratory Syndrome coronavirus 2 (SARS-CoV-2)
LMSFPQSAP

SEQ ID NO: 662 - protein, 9 aa, Severe Acute Respiratory Syndrome coronavirus 2 (SARS-CoV-2)
MSFPQSAPH

SEQ ID NO: 663 - protein, 9 aa, Severe Acute Respiratory Syndrome coronavirus 2 (SARS-CoV-2)
SFPQSAPHG

SEQ ID NO: 664 - protein, 9 aa, Severe Acute Respiratory Syndrome coronavirus 2 (SARS-CoV-2)
FPQSAPHGV

SEQ ID NO: 665 - protein, 9 aa, Severe Acute Respiratory Syndrome coronavirus 2 (SARS-CoV-2)
PQSAPHGVV

SEQ ID NO: 666 - protein, 9 aa, Severe Acute Respiratory Syndrome coronavirus 2 (SARS-CoV-2)
QSAPHGVVF

SEQ ID NO: 667 - protein, 9 aa, Severe Acute Respiratory Syndrome coronavirus 2 (SARS-CoV-2)
SAPHGVVFL

SEQ ID NO: 668 - protein, 16 aa, Severe Acute Respiratory Syndrome coronavirus 2 (SARS-CoV-2)
CDVVIGIVNNTVYDPL

SEQ ID NO: 669 - protein, 9 aa, Severe Acute Respiratory Syndrome coronavirus 2 (SARS-CoV-2)
CDVVIGIVN

SEQ ID NO: 670 - protein, 9 aa, Severe Acute Respiratory Syndrome coronavirus 2 (SARS-CoV-2)
DVVIGIVNN

SEQ ID NO: 671 - protein, 9 aa, Severe Acute Respiratory Syndrome coronavirus 2 (SARS-CoV-2)
VVIGIVNNT

SEQ ID NO: 672 - protein, 9 aa, Severe Acute Respiratory Syndrome coronavirus 2 (SARS-CoV-2)
VIGIVNNTV

SEQ ID NO: 673 - protein, 9 aa, Severe Acute Respiratory Syndrome coronavirus 2 (SARS-CoV-2)
IGIVNNTVY

SEQ ID NO: 674 - protein, 9 aa, Severe Acute Respiratory Syndrome coronavirus 2 (SARS-CoV-2)
GIVNNTVYD

SEQ ID NO: 675 - protein, 9 aa, Severe Acute Respiratory Syndrome coronavirus 2 (SARS-CoV-2)
IVNNTVYDP

SEQ ID NO: 676 - protein, 9 aa, Severe Acute Respiratory Syndrome coronavirus 2 (SARS-CoV-2)
VNNTVYDPL

SEQ ID NO: 677 - protein, 16 aa, Severe Acute Respiratory Syndrome coronavirus 2 (SARS-CoV-2)
LDKYFKNHTSPDVDLG

SEQ ID NO: 678 - protein, 9 aa, Severe Acute Respiratory Syndrome coronavirus 2 (SARS-CoV-2)
LDKYFKNHT

SEQ ID NO: 679 - protein, 9 aa, Severe Acute Respiratory Syndrome coronavirus 2 (SARS-CoV-2)
DKYFKNHTS

SEQ ID NO: 680 - protein, 9 aa, Severe Acute Respiratory Syndrome coronavirus 2 (SARS-CoV-2)
KYFKNHTSP

SEQ ID NO: 681 - protein, 9 aa, Severe Acute Respiratory Syndrome coronavirus 2 (SARS-CoV-2)
YFKNHTSPD

SEQ ID NO: 682 - protein, 9 aa, Severe Acute Respiratory Syndrome coronavirus 2 (SARS-CoV-2)
FKNHTSPDV

SEQ ID NO: 683 - protein, 9 aa, Severe Acute Respiratory Syndrome coronavirus 2 (SARS-CoV-2)
KNHTSPDVD

SEQ ID NO: 684 - protein, 9 aa, Severe Acute Respiratory Syndrome coronavirus 2 (SARS-CoV-2)
NHTSPDVDL

SEQ ID NO: 685 - protein, 9 aa, Severe Acute Respiratory Syndrome coronavirus 2 (SARS-CoV-2)
HTSPDVDLG

SEQ ID NO: 686 - protein, 18 aa, Severe Acute Respiratory Syndrome coronavirus 2 (SARS-CoV-2)
LGDISGINASVVNIQKEI

SEQ ID NO: 687 - protein, 9 aa, Severe Acute Respiratory Syndrome coronavirus 2 (SARS-CoV-2)
LGDISGINA

SEQ ID NO: 688 - protein, 9 aa, Severe Acute Respiratory Syndrome coronavirus 2 (SARS-CoV-2)
GDISGINAS

SEQ ID NO: 689 - protein, 9 aa, Severe Acute Respiratory Syndrome coronavirus 2 (SARS-CoV-2)
DISGINASV

SEQ ID NO: 690 - protein, 9 aa, Severe Acute Respiratory Syndrome coronavirus 2 (SARS-CoV-2)
ISGINASVV

SEQ ID NO: 691 - protein, 9 aa, Severe Acute Respiratory Syndrome coronavirus 2 (SARS-CoV-2)
SGINASVVN

SEQ ID NO: 692 - protein, 9 aa, Severe Acute Respiratory Syndrome coronavirus 2 (SARS-CoV-2)
GINASVVNI

SEQ ID NO: 693 - protein, 9 aa, Severe Acute Respiratory Syndrome coronavirus 2 (SARS-CoV-2)
INASVVNIQ

SEQ ID NO: 694 - protein, 9 aa, Severe Acute Respiratory Syndrome coronavirus 2 (SARS-CoV-2)
NASVVNIQK

SEQ ID NO: 695 - protein, 9 aa, Severe Acute Respiratory Syndrome coronavirus 2 (SARS-CoV-2)
ASVVNIQKE

SEQ ID NO: 696 - protein, 9 aa, Severe Acute Respiratory Syndrome coronavirus 2 (SARS-CoV-2)
SVVNIQKEI

SEQ ID NO: 697 - protein, 18 aa, Severe Acute Respiratory Syndrome coronavirus 2 (SARS-CoV-2)
WYIWLGFIAGLIAIVMVT

SEQ ID NO: 698 - protein, 9 aa, Severe Acute Respiratory Syndrome coronavirus 2 (SARS-CoV-2)
WYIWLGFIA

SEQ ID NO: 699 - protein, 9 aa, Severe Acute Respiratory Syndrome coronavirus 2 (SARS-CoV-2)
YIWLGFIAG

SEQ ID NO: 700 - protein, 9 aa, Severe Acute Respiratory Syndrome coronavirus 2 (SARS-CoV-2)
IWLGFIAGL

SEQ ID NO: 701 - protein, 9 aa, Severe Acute Respiratory Syndrome coronavirus 2 (SARS-CoV-2)
WLGFIAGLI

SEQ ID NO: 702 - protein, 9 aa, Severe Acute Respiratory Syndrome coronavirus 2 (SARS-CoV-2)
LGFIAGLIA

SEQ ID NO: 703 - protein, 9 aa, Severe Acute Respiratory Syndrome coronavirus 2 (SARS-CoV-2)
GFIAGLIAI

SEQ ID NO: 704 - protein, 9 aa, Severe Acute Respiratory Syndrome coronavirus 2 (SARS-CoV-2)
FIAGLIAIV

SEQ ID NO: 705 - protein, 9 aa, Severe Acute Respiratory Syndrome coronavirus 2 (SARS-CoV-2)
IAGLIAIVM

SEQ ID NO: 706 - protein, 9 aa, Severe Acute Respiratory Syndrome coronavirus 2 (SARS-CoV-2)
AGLIAIVMV

SEQ ID NO: 707 - protein, 9 aa, Severe Acute Respiratory Syndrome coronavirus 2 (SARS-CoV-2)
GLIAIVMVT

SEQ ID NO: 708 - protein, 9 aa, Severe Acute Respiratory Syndrome coronavirus 2 (SARS-CoV-2)
LTALRLCAY

SEQ ID NO: 709 - protein, 9 aa, Severe Acute Respiratory Syndrome coronavirus 2 (SARS-CoV-2)
VSLVKPSFY

SEQ ID NO: 710 - protein, 9 aa, Severe Acute Respiratory Syndrome coronavirus 2 (SARS-CoV-2)
LVKPSFYVY

SEQ ID NO: 711 - protein, 9 aa, Severe Acute Respiratory Syndrome coronavirus 2 (SARS-CoV-2)
VSEETGTLI

SEQ ID NO: 712 - protein, 9 aa, Severe Acute Respiratory Syndrome coronavirus 2 (SARS-CoV-2)
NSSRVPDLL

SEQ ID NO: 713 - protein, 9 aa, Severe Acute Respiratory Syndrome coronavirus 2 (SARS-CoV-2)
LAFVVFLLV

SEQ ID NO: 714 - protein, 9 aa, Severe Acute Respiratory Syndrome coronavirus 2 (SARS-CoV-2)
FVSEETGTL

SEQ ID NO: 715 - protein, 9 aa, Severe Acute Respiratory Syndrome coronavirus 2 (SARS-CoV-2)
CCNIVNVSL

SEQ ID NO: 716 - protein, 9 aa, Severe Acute Respiratory Syndrome coronavirus 2 (SARS-CoV-2)
FLAFVVFLL

SEQ ID NO: 717 - protein, 9 aa, Severe Acute Respiratory Syndrome coronavirus 2 (SARS-CoV-2)
SLVKPSFYV

SEQ ID NO: 718 - protein, 9 aa, Severe Acute Respiratory Syndrome coronavirus 2 (SARS-CoV-2)
SVLLFLAFV

SEQ ID NO: 719 - protein, 9 aa, Severe Acute Respiratory Syndrome coronavirus 2 (SARS-CoV-2)
FLLVTLAIL

SEQ ID NO: 720 - protein, 9 aa, Severe Acute Respiratory Syndrome coronavirus 2 (SARS-CoV-2)
RLCAYCCNI

SEQ ID NO: 721 - protein, 9 aa, Severe Acute Respiratory Syndrome coronavirus 2 (SARS-CoV-2)
IVNSVLLFL

SEQ ID NO: 722 - protein, 9 aa, Severe Acute Respiratory Syndrome coronavirus 2 (SARS-CoV-2)
VLLFLAFVV

SEQ ID NO: 723 - protein, 9 aa, Severe Acute Respiratory Syndrome coronavirus 2 (SARS-CoV-2)
FVVFLLVTL

SEQ ID NO: 724 - protein, 9 aa, Severe Acute Respiratory Syndrome coronavirus 2 (SARS-CoV-2)
VTLAILTAL

SEQ ID NO: 725 - protein, 9 aa, Severe Acute Respiratory Syndrome coronavirus 2 (SARS-CoV-2)
YVYSRVKNL

SEQ ID NO: 726 - protein, 9 aa, Severe Acute Respiratory Syndrome coronavirus 2 (SARS-CoV-2)
TLIVNSVLL

SEQ ID NO: 727 - protein, 9 aa, Severe Acute Respiratory Syndrome coronavirus 2 (SARS-CoV-2)
ILTALRLCA

SEQ ID NO: 728 - protein, 9 aa, Severe Acute Respiratory Syndrome coronavirus 2 (SARS-CoV-2)
RVKNLNSSR

SEQ ID NO: 729 - protein, 9 aa, Severe Acute Respiratory Syndrome coronavirus 2 (SARS-CoV-2)
TLAILTALR

SEQ ID NO: 730 - protein, 9 aa, Severe Acute Respiratory Syndrome coronavirus 2 (SARS-CoV-2)
SFYVYSRVK

SEQ ID NO: 731 - protein, 9 aa, Severe Acute Respiratory Syndrome coronavirus 2 (SARS-CoV-2)
LFLAFVVFL

SEQ ID NO: 732 - protein, 9 aa, Severe Acute Respiratory Syndrome coronavirus 2 (SARS-CoV-2)
VFLLVTLAI

SEQ ID NO: 733 - protein, 9 aa, Severe Acute Respiratory Syndrome coronavirus 2 (SARS-CoV-2)
LLFLAFVVF

SEQ ID NO: 734 - protein, 9 aa, Severe Acute Respiratory Syndrome coronavirus 2 (SARS-CoV-2)
VYSRVKNLN

SEQ ID NO: 735 - protein, 9 aa, Severe Acute Respiratory Syndrome coronavirus 2 (SARS-CoV-2)
LIVNSVLLF

SEQ ID NO: 736 - protein, 9 aa, Severe Acute Respiratory Syndrome coronavirus 2 (SARS-CoV-2)
MYSFVSEET

SEQ ID NO: 737 - protein, 9 aa, Severe Acute Respiratory Syndrome coronavirus 2 (SARS-CoV-2)
LAILTALRL

SEQ ID NO: 738 - protein, 9 aa, Severe Acute Respiratory Syndrome coronavirus 2 (SARS-CoV-2)
SEETGTLIV

SEQ ID NO: 739 - protein, 9 aa, Severe Acute Respiratory Syndrome coronavirus 2 (SARS-CoV-2)
EETGTLIVN

SEQ ID NO: 740 - protein, 9 aa, Severe Acute Respiratory Syndrome coronavirus 2 (SARS-CoV-2)
ATSRTLSYY

SEQ ID NO: 741 - protein, 9 aa, Severe Acute Respiratory Syndrome coronavirus 2 (SARS-CoV-2)
SSDNIALLV

SEQ ID NO: 742 - protein, 9 aa, Severe Acute Respiratory Syndrome coronavirus 2 (SARS-CoV-2)
YANRNRFLY

SEQ ID NO: 743 - protein, 9 aa, Severe Acute Respiratory Syndrome coronavirus 2 (SARS-CoV-2)
WICLLQFAY

SEQ ID NO: 744 - protein, 9 aa, Severe Acute Respiratory Syndrome coronavirus 2 (SARS-CoV-2)
LVGLMWLSY

SEQ ID NO: 745 - protein, 9 aa, Severe Acute Respiratory Syndrome coronavirus 2 (SARS-CoV-2)
VATSRTLSY

SEQ ID NO: 746 - protein, 9 aa, Severe Acute Respiratory Syndrome coronavirus 2 (SARS-CoV-2)
NTDHSSSSD

SEQ ID NO: 747 - protein, 9 aa, Severe Acute Respiratory Syndrome coronavirus 2 (SARS-CoV-2)
AGDSGFAAY

SEQ ID NO: 748 - protein, 9 aa, Severe Acute Respiratory Syndrome coronavirus 2 (SARS-CoV-2)
YSRYRIGNY

SEQ ID NO: 749 - protein, 9 aa, Severe Acute Respiratory Syndrome coronavirus 2 (SARS-CoV-2)
LTWICLLQF

SEQ ID NO: 750 - protein, 9 aa, Severe Acute Respiratory Syndrome coronavirus 2 (SARS-CoV-2)
MACLVGLMW

SEQ ID NO: 751 - protein, 9 aa, Severe Acute Respiratory Syndrome coronavirus 2 (SARS-CoV-2)
ESELVIGAV

SEQ ID NO: 752 - protein, 9 aa, Severe Acute Respiratory Syndrome coronavirus 2 (SARS-CoV-2)
SSSDNIALL

SEQ ID NO: 753 - protein, 9 aa, Severe Acute Respiratory Syndrome coronavirus 2 (SARS-CoV-2)
RCDIKDLPK

SEQ ID NO: 754 - protein, 9 aa, Severe Acute Respiratory Syndrome coronavirus 2 (SARS-CoV-2)
HSSSSDNIA

SEQ ID NO: 755 - protein, 9 aa, Severe Acute Respiratory Syndrome coronavirus 2 (SARS-CoV-2)
FIASFRLFA

SEQ ID NO: 756 - protein, 9 aa, Severe Acute Respiratory Syndrome coronavirus 2 (SARS-CoV-2)
ACFVLAAVY

SEQ ID NO: 757 - protein, 9 aa, Severe Acute Respiratory Syndrome coronavirus 2 (SARS-CoV-2)
GLMWLSYFI

SEQ ID NO: 758 - protein, 9 aa, Severe Acute Respiratory Syndrome coronavirus 2 (SARS-CoV-2)
FLFLTWICL

SEQ ID NO: 759 - protein, 9 aa, Severe Acute Respiratory Syndrome coronavirus 2 (SARS-CoV-2)
SMWSFNPET

SEQ ID NO: 760 - protein, 9 aa, Severe Acute Respiratory Syndrome coronavirus 2 (SARS-CoV-2)
KLLEQWNLV

SEQ ID NO: 761 - protein, 9 aa, Severe Acute Respiratory Syndrome coronavirus 2 (SARS-CoV-2)
WLLWPVTLA

SEQ ID NO: 762 - protein, 9 aa, Severe Acute Respiratory Syndrome coronavirus 2 (SARS-CoV-2)
TLACFVLAA

SEQ ID NO: 763 - protein, 9 aa, Severe Acute Respiratory Syndrome coronavirus 2 (SARS-CoV-2)
LMWLSYFIA

SEQ ID NO: 764 - protein, 9 aa, Severe Acute Respiratory Syndrome coronavirus 2 (SARS-CoV-2)
FLWLLWPVT

SEQ ID NO: 765 - protein, 9 aa, Severe Acute Respiratory Syndrome coronavirus 2 (SARS-CoV-2)
FVLAAVYRI

SEQ ID NO: 766 - protein, 9 aa, Severe Acute Respiratory Syndrome coronavirus 2 (SARS-CoV-2)
NLVIGFLFL

SEQ ID NO: 767 - protein, 9 aa, Severe Acute Respiratory Syndrome coronavirus 2 (SARS-CoV-2)
LVIGFLFLT

SEQ ID NO: 768 - protein, 9 aa, Severe Acute Respiratory Syndrome coronavirus 2 (SARS-CoV-2)
FIASFRLFA

SEQ ID NO: 769 - protein, 9 aa, Severe Acute Respiratory Syndrome coronavirus 2 (SARS-CoV-2)
LLWPVTLAC

SEQ ID NO: 770 - protein, 9 aa, Severe Acute Respiratory Syndrome coronavirus 2 (SARS-CoV-2)
IFLWLLWPV

SEQ ID NO: 771 - protein, 9 aa, Severe Acute Respiratory Syndrome coronavirus 2 (SARS-CoV-2)
WLSYFIASF

SEQ ID NO: 772 - protein, 9 aa, Severe Acute Respiratory Syndrome coronavirus 2 (SARS-CoV-2)
IAMACLVGL

SEQ ID NO: 773 - protein, 9 aa, Severe Acute Respiratory Syndrome coronavirus 2 (SARS-CoV-2)
IIKLIFLWL

SEQ ID NO: 774 - protein, 9 aa, Severe Acute Respiratory Syndrome coronavirus 2 (SARS-CoV-2)
YIIKLIFLW

SEQ ID NO: 775 - protein, 9 aa, Severe Acute Respiratory Syndrome coronavirus 2 (SARS-CoV-2)
WITGGIAIA

SEQ ID NO: 776 - protein, 9 aa, Severe Acute Respiratory Syndrome coronavirus 2 (SARS-CoV-2)
GIAIAMACL

SEQ ID NO: 777 - protein, 9 aa, Severe Acute Respiratory Syndrome coronavirus 2 (SARS-CoV-2)
AMACLVGLM

SEQ ID NO: 778 - protein, 9 aa, Severe Acute Respiratory Syndrome coronavirus 2 (SARS-CoV-2)
LFLTWICLL

SEQ ID NO: 779 - protein, 9 aa, Severe Acute Respiratory Syndrome coronavirus 2 (SARS-CoV-2)
FLTWICLLQ

SEQ ID NO: 780 - protein, 9 aa, Severe Acute Respiratory Syndrome coronavirus 2 (SARS-CoV-2)
RINWITGGI

SEQ ID NO: 781 - protein, 9 aa, Severe Acute Respiratory Syndrome coronavirus 2 (SARS-CoV-2)
CLVGLMWLS

SEQ ID NO: 782 - protein, 9 aa, Severe Acute Respiratory Syndrome coronavirus 2 (SARS-CoV-2)
RIAGHHLGR

SEQ ID NO: 783 - protein, 9 aa, Severe Acute Respiratory Syndrome coronavirus 2 (SARS-CoV-2)
LSYFIASFR

SEQ ID NO: 784 - protein, 9 aa, Severe Acute Respiratory Syndrome coronavirus 2 (SARS-CoV-2)
SRYRIGNYK

SEQ ID NO: 785 - protein, 9 aa, Severe Acute Respiratory Syndrome coronavirus 2 (SARS-CoV-2)
ATSRTLSYY

SEQ ID NO: 786 - protein, 9 aa, Severe Acute Respiratory Syndrome coronavirus 2 (SARS-CoV-2)
TSRTLSYYK

SEQ ID NO: 787 - protein, 9 aa, Severe Acute Respiratory Syndrome coronavirus 2 (SARS-CoV-2)
AVILRGHLR

SEQ ID NO: 788 - protein, 9 aa, Severe Acute Respiratory Syndrome coronavirus 2 (SARS-CoV-2)
RTRSMWSFN

SEQ ID NO: 789 - protein, 9 aa, Severe Acute Respiratory Syndrome coronavirus 2 (SARS-CoV-2)
RSMWSFNPE

SEQ ID NO: 790 - protein, 9 aa, Severe Acute Respiratory Syndrome coronavirus 2 (SARS-CoV-2)
LVGLMWLSY

SEQ ID NO: 791 - protein, 9 aa, Severe Acute Respiratory Syndrome coronavirus 2 (SARS-CoV-2)
TITVEELKK

SEQ ID NO: 792 - protein, 9 aa, Severe Acute Respiratory Syndrome coronavirus 2 (SARS-CoV-2)
RLFARTRSM

SEQ ID NO: 793 - protein, 9 aa, Severe Acute Respiratory Syndrome coronavirus 2 (SARS-CoV-2)
LVIGAVILR

SEQ ID NO: 794 - protein, 9 aa, Severe Acute Respiratory Syndrome coronavirus 2 (SARS-CoV-2)
GTITVEELK

SEQ ID NO: 795 - protein, 9 aa, Severe Acute Respiratory Syndrome coronavirus 2 (SARS-CoV-2)
KLIFLWLLW

SEQ ID NO: 796 - protein, 9 aa, Severe Acute Respiratory Syndrome coronavirus 2 (SARS-CoV-2)
YANRNRFLY

SEQ ID NO: 797 - protein, 9 aa, Severe Acute Respiratory Syndrome coronavirus 2 (SARS-CoV-2)
RINWITGGI

SEQ ID NO: 798 - protein, 9 aa, Severe Acute Respiratory Syndrome coronavirus 2 (SARS-CoV-2)
VATSRTLSY

SEQ ID NO: 799 - protein, 9 aa, Severe Acute Respiratory Syndrome coronavirus 2 (SARS-CoV-2)
YSRYRIGNY

SEQ ID NO: 800 - protein, 9 aa, Severe Acute Respiratory Syndrome coronavirus 2 (SARS-CoV-2)
YFIASFRLF

SEQ ID NO: 801 - protein, 9 aa, Severe Acute Respiratory Syndrome coronavirus 2 (SARS-CoV-2)
LWPVTLACF

SEQ ID NO: 802 - protein, 9 aa, Severe Acute Respiratory Syndrome coronavirus 2 (SARS-CoV-2)
LFLTWICLL

SEQ ID NO: 803 - protein, 9 aa, Severe Acute Respiratory Syndrome coronavirus 2 (SARS-CoV-2)
LWLLWPVTL

SEQ ID NO: 804 - protein, 9 aa, Severe Acute Respiratory Syndrome coronavirus 2 (SARS-CoV-2)
SYFIASFRL

SEQ ID NO: 805 - protein, 9 aa, Severe Acute Respiratory Syndrome coronavirus 2 (SARS-CoV-2)
RFLYIIKLI

SEQ ID NO: 806 - protein, 9 aa, Severe Acute Respiratory Syndrome coronavirus 2 (SARS-CoV-2)
LFARTRSMW

SEQ ID NO: 807 - protein, 9 aa, Severe Acute Respiratory Syndrome coronavirus 2 (SARS-CoV-2)
IFLWLLWPV

SEQ ID NO: 808 - protein, 9 aa, Severe Acute Respiratory Syndrome coronavirus 2 (SARS-CoV-2)
AYANRNRFL

SEQ ID NO: 809 - protein, 9 aa, Severe Acute Respiratory Syndrome coronavirus 2 (SARS-CoV-2)
YIIKLIFLW

SEQ ID NO: 810 - protein, 9 aa, Severe Acute Respiratory Syndrome coronavirus 2 (SARS-CoV-2)
LYIIKLIFL

SEQ ID NO: 811 - protein, 9 aa, Severe Acute Respiratory Syndrome coronavirus 2 (SARS-CoV-2)
KLIFLWLLW

SEQ ID NO: 812 - protein, 9 aa, Severe Acute Respiratory Syndrome coronavirus 2 (SARS-CoV-2)
RYRIGNYKL

SEQ ID NO: 813 - protein, 9 aa, Severe Acute Respiratory Syndrome coronavirus 2 (SARS-CoV-2)
IKLIFLWLL

SEQ ID NO: 814 - protein, 9 aa, Severe Acute Respiratory Syndrome coronavirus 2 (SARS-CoV-2)
WLSYFIASF

SEQ ID NO: 815 - protein, 9 aa, Severe Acute Respiratory Syndrome coronavirus 2 (SARS-CoV-2)
SFNPETNIL

SEQ ID NO: 816 - protein, 9 aa, Severe Acute Respiratory Syndrome coronavirus 2 (SARS-CoV-2)
QWNLVIGFL

SEQ ID NO: 817 - protein, 9 aa, Severe Acute Respiratory Syndrome coronavirus 2 (SARS-CoV-2)
WNLVIGFLF

SEQ ID NO: 818 - protein, 9 aa, Severe Acute Respiratory Syndrome coronavirus 2 (SARS-CoV-2)
ARTRSMWSF

SEQ ID NO: 819 - protein, 9 aa, Severe Acute Respiratory Syndrome coronavirus 2 (SARS-CoV-2)
GLMWLSYFI

SEQ ID NO: 820 - protein, 9 aa, Severe Acute Respiratory Syndrome coronavirus 2 (SARS-CoV-2)
NYKLNTDHS

SEQ ID NO: 821 - protein, 9 aa, Severe Acute Respiratory Syndrome coronavirus 2 (SARS-CoV-2)
VGLMWLSYF

SEQ ID NO: 822 - protein, 9 aa, Severe Acute Respiratory Syndrome coronavirus 2 (SARS-CoV-2)
NWITGGIAI

SEQ ID NO: 823 - protein, 9 aa, Severe Acute Respiratory Syndrome coronavirus 2 (SARS-CoV-2)
IAMACLVGL

SEQ ID NO: 824 - protein, 9 aa, Severe Acute Respiratory Syndrome coronavirus 2 (SARS-CoV-2)
TWICLLQFA

SEQ ID NO: 825 - protein, 9 aa, Severe Acute Respiratory Syndrome coronavirus 2 (SARS-CoV-2)
RLFARTRSM

SEQ ID NO: 826 - protein, 9 aa, Severe Acute Respiratory Syndrome coronavirus 2 (SARS-CoV-2)
LPKEITVAT

SEQ ID NO: 827 - protein, 9 aa, Severe Acute Respiratory Syndrome coronavirus 2 (SARS-CoV-2)
HLRIAGHHL

SEQ ID NO: 828 - protein, 9 aa, Severe Acute Respiratory Syndrome coronavirus 2 (SARS-CoV-2)
FAYANRNRF

SEQ ID NO: 829 - protein, 9 aa, Severe Acute Respiratory Syndrome coronavirus 2 (SARS-CoV-2)
ILRGHLRIA

SEQ ID NO: 830 - protein, 9 aa, Severe Acute Respiratory Syndrome coronavirus 2 (SARS-CoV-2)
FAAYSRYRI

SEQ ID NO: 831 - protein, 9 aa, Severe Acute Respiratory Syndrome coronavirus 2 (SARS-CoV-2)
ITVATSRTL

SEQ ID NO: 832 - protein, 9 aa, Severe Acute Respiratory Syndrome coronavirus 2 (SARS-CoV-2)
GIAIAMACL

SEQ ID NO: 833 - protein, 9 aa, Severe Acute Respiratory Syndrome coronavirus 2 (SARS-CoV-2)
ITGGIAIAM

SEQ ID NO: 834 - protein, 9 aa, Severe Acute Respiratory Syndrome coronavirus 2 (SARS-CoV-2)
NVPLHGTIL

SEQ ID NO: 835 - protein, 9 aa, Severe Acute Respiratory Syndrome coronavirus 2 (SARS-CoV-2)
VPLHGTILT

SEQ ID NO: 836 - protein, 9 aa, Severe Acute Respiratory Syndrome coronavirus 2 (SARS-CoV-2)
FLFLTWICL

SEQ ID NO: 837 - protein, 9 aa, Severe Acute Respiratory Syndrome coronavirus 2 (SARS-CoV-2)
RPLLESELV

SEQ ID NO: 838 - protein, 9 aa, Severe Acute Respiratory Syndrome coronavirus 2 (SARS-CoV-2)
RYRIGNYKL

SEQ ID NO: 839 - protein, 9 aa, Severe Acute Respiratory Syndrome coronavirus 2 (SARS-CoV-2)
SELVIGAVI

SEQ ID NO: 840 - protein, 9 aa, Severe Acute Respiratory Syndrome coronavirus 2 (SARS-CoV-2)
KLIFLWLLW

SEQ ID NO: 841 - protein, 9 aa, Severe Acute Respiratory Syndrome coronavirus 2 (SARS-CoV-2)
YIIKLIFLW

SEQ ID NO: 842 - protein, 9 aa, Severe Acute Respiratory Syndrome coronavirus 2 (SARS-CoV-2)
EQWNLVIGF

SEQ ID NO: 843 - protein, 9 aa, Severe Acute Respiratory Syndrome coronavirus 2 (SARS-CoV-2)
PETNILLNV

SEQ ID NO: 844 - protein, 9 aa, Severe Acute Respiratory Syndrome coronavirus 2 (SARS-CoV-2)
KEITVATSR

SEQ ID NO: 845 - protein, 9 aa, Severe Acute Respiratory Syndrome coronavirus 2 (SARS-CoV-2)
ACFVLAAVY

SEQ ID NO: 846 - protein, 9 aa, Severe Acute Respiratory Syndrome coronavirus 2 (SARS-CoV-2)
LESELVIGA

SEQ ID NO: 847 - protein, 9 aa, Severe Acute Respiratory Syndrome coronavirus 2 (SARS-CoV-2)
ARTRSMWSF

SEQ ID NO: 848 - protein, 9 aa, Severe Acute Respiratory Syndrome coronavirus 2 (SARS-CoV-2)
IKLIFLWLL

SEQ ID NO: 849 - protein, 9 aa, Severe Acute Respiratory Syndrome coronavirus 2 (SARS-CoV-2)
VEELKKLLE

SEQ ID NO: 850 - protein, 9 aa, Severe Acute Respiratory Syndrome coronavirus 2 (SARS-CoV-2)
VIGFLFLTW

SEQ ID NO: 851 - protein, 9 aa, Severe Acute Respiratory Syndrome coronavirus 2 (SARS-CoV-2)
NRFLYIIKL

SEQ ID NO: 852 - protein, 9 aa, Severe Acute Respiratory Syndrome coronavirus 2 (SARS-CoV-2)
LTDEMIAQY

SEQ ID NO: 853 - protein, 9 aa, Severe Acute Respiratory Syndrome coronavirus 2 (SARS-CoV-2)
CVADYSVLY

SEQ ID NO: 854 - protein, 9 aa, Severe Acute Respiratory Syndrome coronavirus 2 (SARS-CoV-2)
KTSVDCTMY

SEQ ID NO: 855 - protein, 9 aa, Severe Acute Respiratory Syndrome coronavirus 2 (SARS-CoV-2)
WMESEFRVY

SEQ ID NO: 856 - protein, 9 aa, Severe Acute Respiratory Syndrome coronavirus 2 (SARS-CoV-2)
WTAGAAAYY

SEQ ID NO: 857 - protein, 9 aa, Severe Acute Respiratory Syndrome coronavirus 2 (SARS-CoV-2)
NSFTRGVYY

SEQ ID NO: 858 - protein, 9 aa, Severe Acute Respiratory Syndrome coronavirus 2 (SARS-CoV-2)
NIDGYFKIY

SEQ ID NO: 859 - protein, 9 aa, Severe Acute Respiratory Syndrome coronavirus 2 (SARS-CoV-2)
CNDPFLGVY

SEQ ID NO: 860 - protein, 9 aa, Severe Acute Respiratory Syndrome coronavirus 2 (SARS-CoV-2)
TSNQVAVLY

SEQ ID NO: 861 - protein, 9 aa, Severe Acute Respiratory Syndrome coronavirus 2 (SARS-CoV-2)
SANNCTFEY

SEQ ID NO: 862 - protein, 9 aa, Severe Acute Respiratory Syndrome coronavirus 2 (SARS-CoV-2)
RVDFCGKGY

SEQ ID NO: 863 - protein, 9 aa, Severe Acute Respiratory Syndrome coronavirus 2 (SARS-CoV-2)
GAEHVNNSY

SEQ ID NO: 864 - protein, 9 aa, Severe Acute Respiratory Syndrome coronavirus 2 (SARS-CoV-2)
ASFSTFKCY

SEQ ID NO: 865 - protein, 9 aa, Severe Acute Respiratory Syndrome coronavirus 2 (SARS-CoV-2)
MTSCCSCLK

SEQ ID NO: 866 - protein, 9 aa, Severe Acute Respiratory Syndrome coronavirus 2 (SARS-CoV-2)
YSSANNCTF

SEQ ID NO: 867 - protein, 9 aa, Severe Acute Respiratory Syndrome coronavirus 2 (SARS-CoV-2)
ECSNLLLQY

SEQ ID NO: 868 - protein, 9 aa, Severe Acute Respiratory Syndrome coronavirus 2 (SARS-CoV-2)
VSNGTHWFV

SEQ ID NO: 869 - protein, 9 aa, Severe Acute Respiratory Syndrome coronavirus 2 (SARS-CoV-2)
FVSNGTHWF

SEQ ID NO: 870 - protein, 9 aa, Severe Acute Respiratory Syndrome coronavirus 2 (SARS-CoV-2)
FVFKNIDGY

SEQ ID NO: 871 - protein, 9 aa, Severe Acute Respiratory Syndrome coronavirus 2 (SARS-CoV-2)
YTNSFTRGV

SEQ ID NO: 872 - protein, 9 aa, Severe Acute Respiratory Syndrome coronavirus 2 (SARS-CoV-2)
ITDAVDCAL

SEQ ID NO: 873 - protein, 9 aa, Severe Acute Respiratory Syndrome coronavirus 2 (SARS-CoV-2)
STECSNLLL

SEQ ID NO: 874 - protein, 9 aa, Severe Acute Respiratory Syndrome coronavirus 2 (SARS-CoV-2)
CSCGSCCKF

SEQ ID NO: 875 - protein, 9 aa, Severe Acute Respiratory Syndrome coronavirus 2 (SARS-CoV-2)
NCYFPLQSY

SEQ ID NO: 876 - protein, 9 aa, Severe Acute Respiratory Syndrome coronavirus 2 (SARS-CoV-2)
RISNCVADY

SEQ ID NO: 877 - protein, 9 aa, Severe Acute Respiratory Syndrome coronavirus 2 (SARS-CoV-2)
YLQPRTFLL

SEQ ID NO: 878 - protein, 9 aa, Severe Acute Respiratory Syndrome coronavirus 2 (SARS-CoV-2)
FIAGLIAIV

SEQ ID NO: 879 - protein, 9 aa, Severe Acute Respiratory Syndrome coronavirus 2 (SARS-CoV-2)
KIADYNYKL

SEQ ID NO: 880 - protein, 9 aa, Severe Acute Respiratory Syndrome coronavirus 2 (SARS-CoV-2)
SIIAYTMSL

SEQ ID NO: 881 - protein, 9 aa, Severe Acute Respiratory Syndrome coronavirus 2 (SARS-CoV-2)
FQFCNDPFL

SEQ ID NO: 882 - protein, 9 aa, Severe Acute Respiratory Syndrome coronavirus 2 (SARS-CoV-2)
RLQSLQTYV

SEQ ID NO: 883 - protein, 9 aa, Severe Acute Respiratory Syndrome coronavirus 2 (SARS-CoV-2)
FVFLVLLPL

SEQ ID NO: 884 - protein, 9 aa, Severe Acute Respiratory Syndrome coronavirus 2 (SARS-CoV-2)
VLNDILSRL

SEQ ID NO: 885 - protein, 9 aa, Severe Acute Respiratory Syndrome coronavirus 2 (SARS-CoV-2)
FTISVTTEI

SEQ ID NO: 886 - protein, 9 aa, Severe Acute Respiratory Syndrome coronavirus 2 (SARS-CoV-2)
CMTSCCSCL

SEQ ID NO: 887 - protein, 9 aa, Severe Acute Respiratory Syndrome coronavirus 2 (SARS-CoV-2)
HLMSFPQSA

SEQ ID NO: 888 - protein, 9 aa, Severe Acute Respiratory Syndrome coronavirus 2 (SARS-CoV-2)
ITSGWTFGA

SEQ ID NO: 889 - protein, 9 aa, Severe Acute Respiratory Syndrome coronavirus 2 (SARS-CoV-2)
VVFLHVTYV

SEQ ID NO: 890 - protein, 9 aa, Severe Acute Respiratory Syndrome coronavirus 2 (SARS-CoV-2)
IITTDNTFV

SEQ ID NO: 891 - protein, 9 aa, Severe Acute Respiratory Syndrome coronavirus 2 (SARS-CoV-2)
MIAQYTSAL

SEQ ID NO: 892 - protein, 9 aa, Severe Acute Respiratory Syndrome coronavirus 2 (SARS-CoV-2)
LLFNKVTLA

SEQ ID NO: 893 - protein, 9 aa, Severe Acute Respiratory Syndrome coronavirus 2 (SARS-CoV-2)
IMLCCMTSC

SEQ ID NO: 894 - protein, 9 aa, Severe Acute Respiratory Syndrome coronavirus 2 (SARS-CoV-2)
TLDSKTQSL

SEQ ID NO: 895 - protein, 9 aa, Severe Acute Respiratory Syndrome coronavirus 2 (SARS-CoV-2)
KIYSKHTPI

SEQ ID NO: 896 - protein, 9 aa, Severe Acute Respiratory Syndrome coronavirus 2 (SARS-CoV-2)
YQDVNCTEV

SEQ ID NO: 897 - protein, 9 aa, Severe Acute Respiratory Syndrome coronavirus 2 (SARS-CoV-2)
FLHVTYVPA

SEQ ID NO: 898 - protein, 9 aa, Severe Acute Respiratory Syndrome coronavirus 2 (SARS-CoV-2)
SLSSTASAL

SEQ ID NO: 899 - protein, 9 aa, Severe Acute Respiratory Syndrome coronavirus 2 (SARS-CoV-2)
KQIYKTPPI

SEQ ID NO: 900 - protein, 9 aa, Severe Acute Respiratory Syndrome coronavirus 2 (SARS-CoV-2)
VLYENQKLI

SEQ ID NO: 901 - protein, 9 aa, Severe Acute Respiratory Syndrome coronavirus 2 (SARS-CoV-2)
KLNDLCFTN

SEQ ID NO: 902 - protein, 9 aa, Severe Acute Respiratory Syndrome coronavirus 2 (SARS-CoV-2)
RLFRKSNLK

SEQ ID NO: 903 - protein, 9 aa, Severe Acute Respiratory Syndrome coronavirus 2 (SARS-CoV-2)
GVYFASTEK

SEQ ID NO: 904 - protein, 9 aa, Severe Acute Respiratory Syndrome coronavirus 2 (SARS-CoV-2)
GVYYHKNNK

SEQ ID NO: 905 - protein, 9 aa, Severe Acute Respiratory Syndrome coronavirus 2 (SARS-CoV-2)
MTSCCSCLK

SEQ ID NO: 906 - protein, 9 aa, Severe Acute Respiratory Syndrome coronavirus 2 (SARS-CoV-2)
KVFRSSVLH

SEQ ID NO: 907 - protein, 9 aa, Severe Acute Respiratory Syndrome coronavirus 2 (SARS-CoV-2)
VTYVPAQEK

SEQ ID NO: 908 - protein, 9 aa, Severe Acute Respiratory Syndrome coronavirus 2 (SARS-CoV-2)
TLADAGFIK

SEQ ID NO: 909 - protein, 9 aa, Severe Acute Respiratory Syndrome coronavirus 2 (SARS-CoV-2)
TLKSFTVEK

SEQ ID NO: 910 - protein, 9 aa, Severe Acute Respiratory Syndrome coronavirus 2 (SARS-CoV-2)
SSTASALGK

SEQ ID NO: 911 - protein, 9 aa, Severe Acute Respiratory Syndrome coronavirus 2 (SARS-CoV-2)
GIYQTSNFR

SEQ ID NO: 912 - protein, 9 aa, Severe Acute Respiratory Syndrome coronavirus 2 (SARS-CoV-2)
GVLTESNKK

SEQ ID NO: 913 - protein, 9 aa, Severe Acute Respiratory Syndrome coronavirus 2 (SARS-CoV-2)
QIYKTPPIK

SEQ ID NO: 914 - protein, 9 aa, Severe Acute Respiratory Syndrome coronavirus 2 (SARS-CoV-2)
MSFPQSAPH

SEQ ID NO: 915 - protein, 9 aa, Severe Acute Respiratory Syndrome coronavirus 2 (SARS-CoV-2)
ASFSTFKCY

SEQ ID NO: 916 - protein, 9 aa, Severe Acute Respiratory Syndrome coronavirus 2 (SARS-CoV-2)
SVYAWNRKR

SEQ ID NO: 917 - protein, 9 aa, Severe Acute Respiratory Syndrome coronavirus 2 (SARS-CoV-2)
HVSGTNGTK

SEQ ID NO: 918 - protein, 9 aa, Severe Acute Respiratory Syndrome coronavirus 2 (SARS-CoV-2)
GSFCTQLNR

SEQ ID NO: 919 - protein, 9 aa, Severe Acute Respiratory Syndrome coronavirus 2 (SARS-CoV-2)
QIAPGQTGK

SEQ ID NO: 920 - protein, 9 aa, Severe Acute Respiratory Syndrome coronavirus 2 (SARS-CoV-2)
KCYGVSPTK

SEQ ID NO: 921 - protein, 9 aa, Severe Acute Respiratory Syndrome coronavirus 2 (SARS-CoV-2)
RVDFCGKGY

SEQ ID NO: 922 - protein, 9 aa, Severe Acute Respiratory Syndrome coronavirus 2 (SARS-CoV-2)
KSTNLVKNK

SEQ ID NO: 923 - protein, 9 aa, Severe Acute Respiratory Syndrome coronavirus 2 (SARS-CoV-2)
GTHWFVTQR

SEQ ID NO: 924 - protein, 9 aa, Severe Acute Respiratory Syndrome coronavirus 2 (SARS-CoV-2)
AQALNTLVK

SEQ ID NO: 925 - protein, 9 aa, Severe Acute Respiratory Syndrome coronavirus 2 (SARS-CoV-2)
KNLREFVFK

SEQ ID NO: 926 - protein, 9 aa, Severe Acute Respiratory Syndrome coronavirus 2 (SARS-CoV-2)
ASANLAATK

SEQ ID NO: 927 - protein, 9 aa, Severe Acute Respiratory Syndrome coronavirus 2 (SARS-CoV-2)
QYIKWPWYI

SEQ ID NO: 928 - protein, 9 aa, Severe Acute Respiratory Syndrome coronavirus 2 (SARS-CoV-2)
NYNYLYRLF

SEQ ID NO: 929 - protein, 9 aa, Severe Acute Respiratory Syndrome coronavirus 2 (SARS-CoV-2)
QYGSFCTQL

SEQ ID NO: 930 - protein, 9 aa, Severe Acute Respiratory Syndrome coronavirus 2 (SARS-CoV-2)
YYHKNNKSW

SEQ ID NO: 931 - protein, 9 aa, Severe Acute Respiratory Syndrome coronavirus 2 (SARS-CoV-2)
IWLGFIAGL

SEQ ID NO: 932 - protein, 9 aa, Severe Acute Respiratory Syndrome coronavirus 2 (SARS-CoV-2)
VYSTGSNVF

SEQ ID NO: 933 - protein, 9 aa, Severe Acute Respiratory Syndrome coronavirus 2 (SARS-CoV-2)
VYAWNRKRI

SEQ ID NO: 934 - protein, 9 aa, Severe Acute Respiratory Syndrome coronavirus 2 (SARS-CoV-2)
YFPLQSYGF

SEQ ID NO: 935 - protein, 9 aa, Severe Acute Respiratory Syndrome coronavirus 2 (SARS-CoV-2)
YLQPRTFLL

SEQ ID NO: 936 - protein, 9 aa, Severe Acute Respiratory Syndrome coronavirus 2 (SARS-CoV-2)
PYRVVVLSF

SEQ ID NO: 937 - protein, 9 aa, Severe Acute Respiratory Syndrome coronavirus 2 (SARS-CoV-2)
KWPWYIWLG

SEQ ID NO: 938 - protein, 9 aa, Severe Acute Respiratory Syndrome coronavirus 2 (SARS-CoV-2)
CYGVSPTKL

SEQ ID NO: 939 - protein, 9 aa, Severe Acute Respiratory Syndrome coronavirus 2 (SARS-CoV-2)
PFFSNVTWF

SEQ ID NO: 940 - protein, 9 aa, Severe Acute Respiratory Syndrome coronavirus 2 (SARS-CoV-2)
HWFVTQRNF

SEQ ID NO: 941 - protein, 9 aa, Severe Acute Respiratory Syndrome coronavirus 2 (SARS-CoV-2)
IYQTSNFRV

SEQ ID NO: 942 - protein, 9 aa, Severe Acute Respiratory Syndrome coronavirus 2 (SARS-CoV-2)
VFVSNGTHW

SEQ ID NO: 943 - protein, 9 aa, Severe Acute Respiratory Syndrome coronavirus 2 (SARS-CoV-2)
VYDPLQPEL

SEQ ID NO: 944 - protein, 9 aa, Severe Acute Respiratory Syndrome coronavirus 2 (SARS-CoV-2)
QMAYRFNGI

SEQ ID NO: 945 - protein, 9 aa, Severe Acute Respiratory Syndrome coronavirus 2 (SARS-CoV-2)
IAIPTNFTI

SEQ ID NO: 946 - protein, 9 aa, Severe Acute Respiratory Syndrome coronavirus 2 (SARS-CoV-2)
QYGDCLGDI

SEQ ID NO: 947 - protein, 9 aa, Severe Acute Respiratory Syndrome coronavirus 2 (SARS-CoV-2)
VFKNIDGYF

SEQ ID NO: 948 - protein, 9 aa, Severe Acute Respiratory Syndrome coronavirus 2 (SARS-CoV-2)
CMTSCCSCL

SEQ ID NO: 949 - protein, 9 aa, Severe Acute Respiratory Syndrome coronavirus 2 (SARS-CoV-2)
WYIWLGFIA

SEQ ID NO: 950 - protein, 9 aa, Severe Acute Respiratory Syndrome coronavirus 2 (SARS-CoV-2)
YYPDKVFRS

SEQ ID NO: 951 - protein, 9 aa, Severe Acute Respiratory Syndrome coronavirus 2 (SARS-CoV-2)
STQDLFLPF

SEQ ID NO: 952 - protein, 9 aa, Severe Acute Respiratory Syndrome coronavirus 2 (SARS-CoV-2)
EYVSQPFLM

SEQ ID NO: 953 - protein, 9 aa, Severe Acute Respiratory Syndrome coronavirus 2 (SARS-CoV-2)
SPRRARSVA

SEQ ID NO: 954 - protein, 9 aa, Severe Acute Respiratory Syndrome coronavirus 2 (SARS-CoV-2)
IPIGAGICA

SEQ ID NO: 955 - protein, 9 aa, Severe Acute Respiratory Syndrome coronavirus 2 (SARS-CoV-2)
LPPAYTNSF

SEQ ID NO: 956 - protein, 9 aa, Severe Acute Respiratory Syndrome coronavirus 2 (SARS-CoV-2)
TPINLVRDL

SEQ ID NO: 957 - protein, 9 aa, Severe Acute Respiratory Syndrome coronavirus 2 (SARS-CoV-2)
IPTNFTISV

SEQ ID NO: 958 - protein, 9 aa, Severe Acute Respiratory Syndrome coronavirus 2 (SARS-CoV-2)
RAAEIRASA

SEQ ID NO: 959 - protein, 9 aa, Severe Acute Respiratory Syndrome coronavirus 2 (SARS-CoV-2)
MIAQYTSAL

SEQ ID NO: 960 - protein, 9 aa, Severe Acute Respiratory Syndrome coronavirus 2 (SARS-CoV-2)
FPREGVFVS

SEQ ID NO: 961 - protein, 9 aa, Severe Acute Respiratory Syndrome coronavirus 2 (SARS-CoV-2)
LPPLLTDEM

SEQ ID NO: 962 - protein, 9 aa, Severe Acute Respiratory Syndrome coronavirus 2 (SARS-CoV-2)
LPFNDGVYF

SEQ ID NO: 963 - protein, 9 aa, Severe Acute Respiratory Syndrome coronavirus 2 (SARS-CoV-2)
FPQSAPHGV

SEQ ID NO: 964 - protein, 9 aa, Severe Acute Respiratory Syndrome coronavirus 2 (SARS-CoV-2)
LPLVSSQCV

SEQ ID NO: 965 - protein, 9 aa, Severe Acute Respiratory Syndrome coronavirus 2 (SARS-CoV-2)
APGQTGKIA

SEQ ID NO: 966 - protein, 9 aa, Severe Acute Respiratory Syndrome coronavirus 2 (SARS-CoV-2)
LPDDFTGCV

SEQ ID NO: 967 - protein, 9 aa, Severe Acute Respiratory Syndrome coronavirus 2 (SARS-CoV-2)
GPKKSTNLV

SEQ ID NO: 968 - protein, 9 aa, Severe Acute Respiratory Syndrome coronavirus 2 (SARS-CoV-2)
LLALHRSYL

SEQ ID NO: 969 - protein, 9 aa, Severe Acute Respiratory Syndrome coronavirus 2 (SARS-CoV-2)
VVNQNAQAL

SEQ ID NO: 970 - protein, 9 aa, Severe Acute Respiratory Syndrome coronavirus 2 (SARS-CoV-2)
TPTWRVYST

SEQ ID NO: 971 - protein, 9 aa, Severe Acute Respiratory Syndrome coronavirus 2 (SARS-CoV-2)
KPFERDIST

SEQ ID NO: 972 - protein, 9 aa, Severe Acute Respiratory Syndrome coronavirus 2 (SARS-CoV-2)
WPWYIWLGF

SEQ ID NO: 973 - protein, 9 aa, Severe Acute Respiratory Syndrome coronavirus 2 (SARS-CoV-2)
SLSSTASAL

SEQ ID NO: 974 - protein, 9 aa, Severe Acute Respiratory Syndrome coronavirus 2 (SARS-CoV-2)
IANQFNSAI

SEQ ID NO: 975 - protein, 9 aa, Severe Acute Respiratory Syndrome coronavirus 2 (SARS-CoV-2)
QPTESIVRF

SEQ ID NO: 976 - protein, 9 aa, Severe Acute Respiratory Syndrome coronavirus 2 (SARS-CoV-2)
SVAYSNNSI

SEQ ID NO: 977 - protein, 9 aa, Severe Acute Respiratory Syndrome coronavirus 2 (SARS-CoV-2)
SVLYNSASF

SEQ ID NO: 978 - protein, 9 aa, Severe Acute Respiratory Syndrome coronavirus 2 (SARS-CoV-2)
AEVQIDRLI

SEQ ID NO: 979 - protein, 9 aa, Severe Acute Respiratory Syndrome coronavirus 2 (SARS-CoV-2)
QELGKYEQY

SEQ ID NO: 980 - protein, 9 aa, Severe Acute Respiratory Syndrome coronavirus 2 (SARS-CoV-2)
YEQYIKWPW

SEQ ID NO: 981 - protein, 9 aa, Severe Acute Respiratory Syndrome coronavirus 2 (SARS-CoV-2)
FEYVSQPFL

SEQ ID NO: 982 - protein, 9 aa, Severe Acute Respiratory Syndrome coronavirus 2 (SARS-CoV-2)
AEIRASANL

SEQ ID NO: 983 - protein, 9 aa, Severe Acute Respiratory Syndrome coronavirus 2 (SARS-CoV-2)
GEVFNATRF

SEQ ID NO: 984 - protein, 9 aa, Severe Acute Respiratory Syndrome coronavirus 2 (SARS-CoV-2)
NEVAKNLNE

SEQ ID NO: 985 - protein, 9 aa, Severe Acute Respiratory Syndrome coronavirus 2 (SARS-CoV-2)
TEILPVSMT

SEQ ID NO: 986 - protein, 9 aa, Severe Acute Respiratory Syndrome coronavirus 2 (SARS-CoV-2)
AEHVNNSYE

SEQ ID NO: 987 - protein, 9 aa, Severe Acute Respiratory Syndrome coronavirus 2 (SARS-CoV-2)
AENSVAYSN

SEQ ID NO: 988 - protein, 9 aa, Severe Acute Respiratory Syndrome coronavirus 2 (SARS-CoV-2)
ADAGFIKQY

SEQ ID NO: 989 - protein, 9 aa, Severe Acute Respiratory Syndrome coronavirus 2 (SARS-CoV-2)
SETKCTLKS

SEQ ID NO: 990 - protein, 9 aa, Severe Acute Respiratory Syndrome coronavirus 2 (SARS-CoV-2)
TRFASVYAW

SEQ ID NO: 991 - protein, 9 aa, Severe Acute Respiratory Syndrome coronavirus 2 (SARS-CoV-2)
TEKSNIIRG

SEQ ID NO: 992 - protein, 9 aa, Severe Acute Respiratory Syndrome coronavirus 2 (SARS-CoV-2)
REGVFVSNG

SEQ ID NO: 993 - protein, 9 aa, Severe Acute Respiratory Syndrome coronavirus 2 (SARS-CoV-2)
QYIKWPWYI

SEQ ID NO: 994 - protein, 9 aa, Severe Acute Respiratory Syndrome coronavirus 2 (SARS-CoV-2)
GTITSGWTF

SEQ ID NO: 995 - protein, 9 aa, Severe Acute Respiratory Syndrome coronavirus 2 (SARS-CoV-2)
NENGTITDA

SEQ ID NO: 996 - protein, 9 aa, Severe Acute Respiratory Syndrome coronavirus 2 (SARS-CoV-2)
MVTIMLCCM

SEQ ID NO: 997 - protein, 9 aa, Severe Acute Respiratory Syndrome coronavirus 2 (SARS-CoV-2)
NDPFLGVYY

SEQ ID NO: 998 - protein, 9 aa, Severe Acute Respiratory Syndrome coronavirus 2 (SARS-CoV-2)
FELLHAPAT

SEQ ID NO: 999 - protein, 9 aa, Severe Acute Respiratory Syndrome coronavirus 2 (SARS-CoV-2)
NDLCFTNVY

SEQ ID NO: 1000 - protein, 9 aa, Severe Acute Respiratory Syndrome coronavirus 2 (SARS-CoV-2)
LEILDITPC

SEQ ID NO: 1001 - protein, 9 aa, Severe Acute Respiratory Syndrome coronavirus 2 (SARS-CoV-2)
ALNTLVKQL

SEQ ID NO: 1002 - protein, 9 aa, Severe Acute Respiratory Syndrome coronavirus 2 (SARS-CoV-2)
MESEFRVYS

SEQ ID NO: 1003 - protein, 19 aa, Severe Acute Respiratory Syndrome coronavirus 2 (SARS-CoV-2)
FVSEETGTLIVNSVLLFLA

SEQ ID NO: 1004 - protein, 25 aa, Severe Acute Respiratory Syndrome coronavirus 2 (SARS-CoV-2)
VLLFLAFVVFLLVTLAILTALRLCA

SEQ ID NO: 1005 - protein, 25 aa, Severe Acute Respiratory Syndrome coronavirus 2 (SARS-CoV-2)
VSLVKPSFYVYSRVKNLNSSRVPDL

SEQ ID NO: 1006 - protein, 13 aa, Severe Acute Respiratory Syndrome coronavirus 2 (SARS-CoV-2)
LLEQWNLVIGFLF

SEQ ID NO: 1007 - protein, 18 aa, Severe Acute Respiratory Syndrome coronavirus 2 (SARS-CoV-2)
FLTWICLLQFAYANRNRF

SEQ ID NO: 1008 - protein, 19 aa, Severe Acute Respiratory Syndrome coronavirus 2 (SARS-CoV-2)
FLYIIKLIFLWLLWPVTLA

SEQ ID NO: 1009 - protein, 14 aa, Severe Acute Respiratory Syndrome coronavirus 2 (SARS-CoV-2)
VTLACFVLAAVYRI

SEQ ID NO: 1010 - protein, 22 aa, Severe Acute Respiratory Syndrome coronavirus 2 (SARS-CoV-2)
LMWLSYFIASFRLFARTRSMWS

SEQ ID NO: 1011 - protein, 15 aa, Severe Acute Respiratory Syndrome coronavirus 2 (SARS-CoV-2)
FNPETNILLNVPLHG

SEQ ID NO: 1012 - protein, 15 aa, Severe Acute Respiratory Syndrome coronavirus 2 (SARS-CoV-2)
VILRGHLRIAGHHLG

SEQ ID NO: 1013 - protein, 11 aa, Severe Acute Respiratory Syndrome coronavirus 2 (SARS-CoV-2)
ITVATSRTLSY

SEQ ID NO: 1014 - protein, 12 aa, Severe Acute Respiratory Syndrome coronavirus 2 (SARS-CoV-2)
YYKLGASQRVAG

SEQ ID NO: 1015 - protein, 16 aa, Severe Acute Respiratory Syndrome coronavirus 2 (SARS-CoV-2)
YRIGNYKLNTDHSSSS

SEQ ID NO: 1016 - protein, 22 aa, Severe Acute Respiratory Syndrome coronavirus 2 (SARS-CoV-2)
FVFLVLLPLVSSQCVNLTTRTQ

SEQ ID NO: 1017 - protein, 9 aa, Severe Acute Respiratory Syndrome coronavirus 2 (SARS-CoV-2)
YTNSFTRGV

SEQ ID NO: 1018 - protein, 15 aa, Severe Acute Respiratory Syndrome coronavirus 2 (SARS-CoV-2)
VFRSSVLHSTQDLFL

SEQ ID NO: 1019 - protein, 12 aa, Severe Acute Respiratory Syndrome coronavirus 2 (SARS-CoV-2)
FLPFFSNVTWFH

SEQ ID NO: 1020 - protein, 13 aa, Severe Acute Respiratory Syndrome coronavirus 2 (SARS-CoV-2)
WFHAIHVSGTNGT

SEQ ID NO: 1021 - protein, 11 aa, Severe Acute Respiratory Syndrome coronavirus 2 (SARS-CoV-2)
VYFASTEKSNI

SEQ ID NO: 1022 - protein, 13 aa, Severe Acute Respiratory Syndrome coronavirus 2 (SARS-CoV-2)
SLLIVNNATNVVI

SEQ ID NO: 1023 - protein, 14 aa, Severe Acute Respiratory Syndrome coronavirus 2 (SARS-CoV-2)
FLGVYYHKNNKSWM

SEQ ID NO: 1024 - protein, 12 aa, Severe Acute Respiratory Syndrome coronavirus 2 (SARS-CoV-2)
FRVYSSANNCTF

SEQ ID NO: 1025 - protein, 13 aa, Severe Acute Respiratory Syndrome coronavirus 2 (SARS-CoV-2)
YFKIYSKHTPINL

SEQ ID NO: 1026 - protein, 11 aa, Severe Acute Respiratory Syndrome coronavirus 2 (SARS-CoV-2)
INLVRDLPQGF

SEQ ID NO: 1027 - protein, 18 aa, Severe Acute Respiratory Syndrome coronavirus 2 (SARS-CoV-2)
ITRFQTLLALHRSYLTPG

SEQ ID NO: 1028 - protein, 17 aa, Severe Acute Respiratory Syndrome coronavirus 2 (SARS-CoV-2)
YLQPRTFLLKYNENGTI

SEQ ID NO: 1029 - protein, 15 aa, Severe Acute Respiratory Syndrome coronavirus 2 (SARS-CoV-2)
IYQTSNFRVQPTESI

SEQ ID NO: 1030 - protein, 13 aa, Severe Acute Respiratory Syndrome coronavirus 2 (SARS-CoV-2)
FGEVFNATRFASV

SEQ ID NO: 1031 - protein, 12 aa, Severe Acute Respiratory Syndrome coronavirus 2 (SARS-CoV-2)
VYAWNRKRISNC

SEQ ID NO: 1032 - protein, 13 aa, Severe Acute Respiratory Syndrome coronavirus 2 (SARS-CoV-2)
YSVLYNSASFSTF

SEQ ID NO: 1033 - protein, 21 aa, Severe Acute Respiratory Syndrome coronavirus 2 (SARS-CoV-2)
VGGNYNYLYRLFRKSNLKPFE

SEQ ID NO: 1034 - protein, 12 aa, Severe Acute Respiratory Syndrome coronavirus 2 (SARS-CoV-2)
FNCYFPLQSYGF

SEQ ID NO: 1035 - protein, 11 aa, Severe Acute Respiratory Syndrome coronavirus 2 (SARS-CoV-2)
YGFQPTNGVGY

SEQ ID NO: 1036 - protein, 16 aa, Severe Acute Respiratory Syndrome coronavirus 2 (SARS-CoV-2)
VVLSFELLHAPATVCG

SEQ ID NO: 1037 - protein, 13 aa, Severe Acute Respiratory Syndrome coronavirus 2 (SARS-CoV-2)
VNFNFNGLTGTGV

SEQ ID NO: 1038 - protein, 9 aa, Severe Acute Respiratory Syndrome coronavirus 2 (SARS-CoV-2)
FTISVTTEI

SEQ ID NO: 1039 - protein, 20 aa, Severe Acute Respiratory Syndrome coronavirus 2 (SARS-CoV-2)
LLLQYGSFCTQLNRALTGIA

SEQ ID NO: 1040 - protein, 14 aa, Severe Acute Respiratory Syndrome coronavirus 2 (SARS-CoV-2)
FNFSQILPDPSKPS

SEQ ID NO: 1041 - protein, 14 aa, Severe Acute Respiratory Syndrome coronavirus 2 (SARS-CoV-2)
LLFNKVTLADAGFI

SEQ ID NO: 1042 - protein, 12 aa, Severe Acute Respiratory Syndrome coronavirus 2 (SARS-CoV-2)
FNGLTVLPPLLT

SEQ ID NO: 1043 - protein, 13 aa, Severe Acute Respiratory Syndrome coronavirus 2 (SARS-CoV-2)
MIAQYTSALLAGT

SEQ ID NO: 1044 - protein, 11 aa, Severe Acute Respiratory Syndrome coronavirus 2 (SARS-CoV-2)
FAMQMAYRFNG

SEQ ID NO: 1045 - protein, 21 aa, Severe Acute Respiratory Syndrome coronavirus 2 (SARS-CoV-2)
LIANQFNSAIGKIQDSLSSTA

SEQ ID NO: 1046 - protein, 10 aa, Severe Acute Respiratory Syndrome coronavirus 2 (SARS-CoV-2)
SLSSTASALG

SEQ ID NO: 1047 - protein, 20 aa, Severe Acute Respiratory Syndrome coronavirus 2 (SARS-CoV-2)
LNTLVKQLSSNFGAISSVLN

SEQ ID NO: 1048 - protein, 17 aa, Severe Acute Respiratory Syndrome coronavirus 2 (SARS-CoV-2)
IDRLITGRLQSLQTYVT

SEQ ID NO: 1049 - protein, 14 aa, Severe Acute Respiratory Syndrome coronavirus 2 (SARS-CoV-2)
IRAAEIRASANLAA

SEQ ID NO: 1050 - protein, 14 aa, Severe Acute Respiratory Syndrome coronavirus 2 (SARS-CoV-2)
YHLMSFPQSAPHGV

SEQ ID NO: 1051 - protein, 10 aa, Severe Acute Respiratory Syndrome coronavirus 2 (SARS-CoV-2)
VIGIVNNTVY

SEQ ID NO: 1052 - protein, 10 aa, Severe Acute Respiratory Syndrome coronavirus 2 (SARS-CoV-2)
YFKNHTSPDV

SEQ ID NO: 1053 - protein, 12 aa, Severe Acute Respiratory Syndrome coronavirus 2 (SARS-CoV-2)
ISGINASVVNIQ

SEQ ID NO: 1054 - protein, 12 aa, Severe Acute Respiratory Syndrome coronavirus 2 (SARS-CoV-2)
WLGFIAGLIAIV

SEQ ID NO: 1055 - protein, 15 aa, Severe Acute Respiratory Syndrome coronavirus 2 (SARS-CoV-2)
MYSFVSEETGTLIVN

SEQ ID NO: 1056 - protein, 18 aa, Severe Acute Respiratory Syndrome coronavirus 2 (SARS-CoV-2)
EETGTLIVNSVLLFLAFV

SEQ ID NO: 1057 - protein, 19 aa, Severe Acute Respiratory Syndrome coronavirus 2 (SARS-CoV-2)
VNSVLLFLAFVVFLLVTLA

SEQ ID NO: 1058 - protein, 16 aa, Severe Acute Respiratory Syndrome coronavirus 2 (SARS-CoV-2)
PSFYVYSRVKNLNSSR

SEQ ID NO: 1059 - protein, 13 aa, Severe Acute Respiratory Syndrome coronavirus 2 (SARS-CoV-2)
SRVKNLNSSRVPD

SEQ ID NO: 1060 - protein, 15 aa, Severe Acute Respiratory Syndrome coronavirus 2 (SARS-CoV-2)
LKKLLEQWNLVIGFL

SEQ ID NO: 1061 - protein, 15 aa, Severe Acute Respiratory Syndrome coronavirus 2 (SARS-CoV-2)
LEQWNLVIGFLFLTW

SEQ ID NO: 1062 - protein, 17 aa, Severe Acute Respiratory Syndrome coronavirus 2 (SARS-CoV-2)
ISLLQFAYANRNRFLYI

SEQ ID NO: 1063 - protein, 19 aa, Severe Acute Respiratory Syndrome coronavirus 2 (SARS-CoV-2)
RNRFLYIIKLIFLWLLWPV

SEQ ID NO: 1064 - protein, 15 aa, Severe Acute Respiratory Syndrome coronavirus 2 (SARS-CoV-2)
LACFVLAAVYRINWI

SEQ ID NO: 1065 - protein, 15 aa, Severe Acute Respiratory Syndrome coronavirus 2 (SARS-CoV-2)
LSYFIASFRLFARTR

SEQ ID NO: 1066 - protein, 17 aa, Severe Acute Respiratory Syndrome coronavirus 2 (SARS-CoV-2)
IASFRLFARTRSMWSFN

SEQ ID NO: 1067 - protein, 14 aa, Severe Acute Respiratory Syndrome coronavirus 2 (SARS-CoV-2)
MWSFNPETNILLNV

SEQ ID NO: 1068 - protein, 15 aa, Severe Acute Respiratory Syndrome coronavirus 2 (SARS-CoV-2)
ETNILLNVPLHGTIL

SEQ ID NO: 1069 - protein, 15 aa, Severe Acute Respiratory Syndrome coronavirus 2 (SARS-CoV-2)
RGHLRIAGHHLGRSD

SEQ ID NO: 1070 - protein, 15 aa, Severe Acute Respiratory Syndrome coronavirus 2 (SARS-CoV-2)
PKEITVATSRTLSYY

SEQ ID NO: 1071 - protein, 16 aa, Severe Acute Respiratory Syndrome coronavirus 2 (SARS-CoV-2)
TLSYYKLGASQRVAGD

SEQ ID NO: 1072 - protein, 17 aa, Severe Acute Respiratory Syndrome coronavirus 2 (SARS-CoV-2)
IGNYKLNTDHSSSSDNI

SEQ ID NO: 1073 - protein, 16 aa, Severe Acute Respiratory Syndrome coronavirus 2 (SARS-CoV-2)
MFVFLVLLPLVSSQCV

SEQ ID NO: 1074 - protein, 14 aa, Severe Acute Respiratory Syndrome coronavirus 2 (SARS-CoV-2)
PPAYTNSFTRGVYY

SEQ ID NO: 1075 - protein, 15 aa, Severe Acute Respiratory Syndrome coronavirus 2 (SARS-CoV-2)
DKVFRSSVLHSTQDL

SEQ ID NO: 1076 - protein, 15 aa, Severe Acute Respiratory Syndrome coronavirus 2 (SARS-CoV-2)
QDLFLPFFSNVTWFH

SEQ ID NO: 1077 - protein, 16 aa, Severe Acute Respiratory Syndrome coronavirus 2 (SARS-CoV-2)
NVTWFHAIHVSGTNGT

SEQ ID NO: 1078 - protein, 16 aa, Artificial Sequence
  Synthetic
NEGVYFASTEKSNIIR

SEQ ID NO: 1079 - protein, 17 aa, Severe Acute Respiratory Syndrome coronavirus 2 (SARS-CoV-2)
TQSLLIVNNATNVVIKV

SEQ ID NO: 1080 - protein, 17 aa, Severe Acute Respiratory Syndrome coronavirus 2 (SARS-CoV-2)
FLGVYYHKNNKSWMESE

SEQ ID NO: 1081 - protein, 18 aa, Severe Acute Respiratory Syndrome coronavirus 2 (SARS-CoV-2)
ESEFRVYSSANNCTFEYV

SEQ ID NO: 1082 - protein, 15 aa, Severe Acute Respiratory Syndrome coronavirus 2 (SARS-CoV-2)
DGYFKIYSKHTPINL

SEQ ID NO: 1083 - protein, 15 aa, Severe Acute Respiratory Syndrome coronavirus 2 (SARS-CoV-2)
HTPINLVRDLPQGFS

SEQ ID NO: 1084 - protein, 17 aa, Severe Acute Respiratory Syndrome coronavirus 2 (SARS-CoV-2)
GINITRFQTLLALHRSY

SEQ ID NO: 1085 - protein, 17 aa, Severe Acute Respiratory Syndrome coronavirus 2 (SARS-CoV-2)
QTLLALHRSYLTPGDSS

SEQ ID NO: 1086 - protein, 17 aa, Severe Acute Respiratory Syndrome coronavirus 2 (SARS-CoV-2)
PRTFLLKYNENGTITDA

SEQ ID NO: 1087 - protein, 15 aa, Severe Acute Respiratory Syndrome coronavirus 2 (SARS-CoV-2)
TSNFRVQPTESIVRF

SEQ ID NO: 1088 - protein, 15 aa, Severe Acute Respiratory Syndrome coronavirus 2 (SARS-CoV-2)
FGEVFNATRFASVYA

SEQ ID NO: 1089 - protein, 18 aa, Severe Acute Respiratory Syndrome coronavirus 2 (SARS-CoV-2)
FASVYAWNRKRISNCVAD

SEQ ID NO: 1090 - protein, 17 aa, Severe Acute Respiratory Syndrome coronavirus 2 (SARS-CoV-2)
VADYSVLYNSASFSTFK

SEQ ID NO: 1091 - protein, 23 aa, Severe Acute Respiratory Syndrome coronavirus 2 (SARS-CoV-2)
GGNYNYLYRLFRKSNLKPFERDI

SEQ ID NO: 1092 - protein, 18 aa, Severe Acute Respiratory Syndrome coronavirus 2 (SARS-CoV-2)
VEGFNCYFPLQSYGFQPT

SEQ ID NO: 1093 - protein, 17 aa, Severe Acute Respiratory Syndrome coronavirus 2 (SARS-CoV-2)
LQSYGFQPTNGVGYQPY

SEQ ID NO: 1094 - protein, 15 aa, Severe Acute Respiratory Syndrome coronavirus 2 (SARS-CoV-2)
YRVVVLSFELLHAPA

SEQ ID NO: 1095 - protein, 15 aa, Severe Acute Respiratory Syndrome coronavirus 2 (SARS-CoV-2)
VLSFELLHAPATVCG

SEQ ID NO: 1096 - protein, 14 aa, Severe Acute Respiratory Syndrome coronavirus 2 (SARS-CoV-2)
NKSVNFNFNGLTGT

SEQ ID NO: 1097 - protein, 15 aa, Severe Acute Respiratory Syndrome coronavirus 2 (SARS-CoV-2)
NFNFNGLTGTGVLTE

SEQ ID NO: 1098 - protein, 15 aa, Severe Acute Respiratory Syndrome coronavirus 2 (SARS-CoV-2)
PTNFTISVTTEILPV

SEQ ID NO: 1099 - protein, 22 aa, Severe Acute Respiratory Syndrome coronavirus 2 (SARS-CoV-2)
LLQYGSFCTQLNRALTGIAVEQ

SEQ ID NO: 1100 - protein, 20 aa, Severe Acute Respiratory Syndrome coronavirus 2 (SARS-CoV-2)
FGGFNFSQILPDPSKPSKRS

SEQ ID NO: 1101 - protein, 14 aa, Severe Acute Respiratory Syndrome coronavirus 2 (SARS-CoV-2)
IEDLLFNKVTLADA

SEQ ID NO: 1102 - protein, 18 aa, Severe Acute Respiratory Syndrome coronavirus 2 (SARS-CoV-2)
AQKFNGLTVLPPLLTDEM

SEQ ID NO: 1103 - protein, 14 aa, Severe Acute Respiratory Syndrome coronavirus 2 (SARS-CoV-2)
NGLTVLPPLLTDEM

SEQ ID NO: 1104 - protein, 14 aa, Severe Acute Respiratory Syndrome coronavirus 2 (SARS-CoV-2)
TDEMIAQYTSALLA

SEQ ID NO: 1105 - protein, 18 aa, Artificial Sequence
  Synthetic
LQIPFAMQMAYRFNGIGV

SEQ ID NO: 1106 - protein, 15 aa, Severe Acute Respiratory Syndrome coronavirus 2 (SARS-CoV-2)
QKLIANQFNSAIGKI

SEQ ID NO: 1107 - protein, 15 aa, Severe Acute Respiratory Syndrome coronavirus 2 (SARS-CoV-2)
ANQFNSAIGKIQDSL

SEQ ID NO: 1108 - protein, 16 aa, Severe Acute Respiratory Syndrome coronavirus 2 (SARS-CoV-2)
IQDSLSSTASALGKLQ

SEQ ID NO: 1109 - protein, 15 aa, Severe Acute Respiratory Syndrome coronavirus 2 (SARS-CoV-2)
NTLVKQLSSNFGAIS

SEQ ID NO: 1110 - protein, 15 aa, Severe Acute Respiratory Syndrome coronavirus 2 (SARS-CoV-2)
TGRLQSLQTYVTQQL

SEQ ID NO: 1111 - protein, 15 aa, Severe Acute Respiratory Syndrome coronavirus 2 (SARS-CoV-2)
QQLIRAAEIRASANL

SEQ ID NO: 1112 - protein, 15 aa, Severe Acute Respiratory Syndrome coronavirus 2 (SARS-CoV-2)
AAEIRASANLAATKM

SEQ ID NO: 1113 - protein, 15 aa, Severe Acute Respiratory Syndrome coronavirus 2 (SARS-CoV-2)
GKGYHLMSFPQSAPH

SEQ ID NO: 1114 - protein, 15 aa, Severe Acute Respiratory Syndrome coronavirus 2 (SARS-CoV-2)
DVVIGIVNNTVYDPL

SEQ ID NO: 1115 - protein, 15 aa, Severe Acute Respiratory Syndrome coronavirus 2 (SARS-CoV-2)
LDKYFKNHTSPDVDL

SEQ ID NO: 1116 - protein, 15 aa, Severe Acute Respiratory Syndrome coronavirus 2 (SARS-CoV-2)
ISGINASVVNIQKEI

SEQ ID NO: 1117 - protein, 15 aa, Severe Acute Respiratory Syndrome coronavirus 2 (SARS-CoV-2)
WYIWLGFIAGLIAIV

SEQ ID NO: 1118 - protein, 17 aa, Severe Acute Respiratory Syndrome coronavirus 2 (SARS-CoV-2)
ICLLQFAYANRNRFLYI

SEQ ID NO: 1119 - protein, 15 aa, Severe Acute Respiratory Syndrome coronavirus 2 (SARS-CoV-2)
RGHLRIAGHHLGRCD

SEQ ID NO: 1120 - protein, 16 aa, Severe Acute Respiratory Syndrome coronavirus 2 (SARS-CoV-2)
NDGVYFASTEKSNIIR

SEQ ID NO: 1121 - protein, 18 aa, Artificial Sequence
  Synthetic
FASVYAWNRKRISNSVAD

SEQ ID NO: 1122 - protein, 14 aa, Severe Acute Respiratory Syndrome coronavirus 2 (SARS-CoV-2)
NKCVNFNFNGLTGT

SEQ ID NO: 1123 - protein, 17 aa, Severe Acute Respiratory Syndrome coronavirus 2 (SARS-CoV-2)
QIPFAMQMAYRFNGIGV

SEQ ID NO: 1124 - protein, 18 aa, Severe Acute Respiratory Syndrome coronavirus 2 (SARS-CoV-2)
DDQIGYYRRATRRIRGGD

SEQ ID NO: 1125 - protein, 15 aa, Severe Acute Respiratory Syndrome coronavirus 2 (SARS-CoV-2)
NAAIVLQLPQGTTLP

SEQ ID NO: 1126 - protein, 15 aa, Severe Acute Respiratory Syndrome coronavirus 2 (SARS-CoV-2)
LDRLNQLESKMSGKG

SEQ ID NO: 1127 - protein, 17 aa, Severe Acute Respiratory Syndrome coronavirus 2 (SARS-CoV-2)
FKDQVILLNKHIDAYKT

SEQ ID NO: 1128 - protein, 18 aa, Severe Acute Respiratory Syndrome coronavirus 2 (SARS-CoV-2)
DFSKQLQQSMSSADSTQA

SEQ ID NO: 1129 - protein, 15 aa, Severe Acute Respiratory Syndrome coronavirus 2 (SARS-CoV-2)
MDLFMRIFTIGTVTL

SEQ ID NO: 1130 - protein, 16 aa, Severe Acute Respiratory Syndrome coronavirus 2 (SARS-CoV-2)
PSDFVRATATIPIQAS

SEQ ID NO: 1131 - protein, 17 aa, Severe Acute Respiratory Syndrome coronavirus 2 (SARS-CoV-2)
PFGWLIVGVALLAVFQS

SEQ ID NO: 1132 - protein, 15 aa, Severe Acute Respiratory Syndrome coronavirus 2 (SARS-CoV-2)
LAVFQSASKIITLKK

SEQ ID NO: 1133 - protein, 16 aa, Severe Acute Respiratory Syndrome coronavirus 2 (SARS-CoV-2)
KRWQLALSKGVHFVCN

SEQ ID NO: 1134 - protein, 33 aa, Severe Acute Respiratory Syndrome coronavirus 2 (SARS-CoV-2)
SKGVHFVCNLLLLFVTVYSHLLLVAAGLEAPFL

SEQ ID NO: 1135 - protein, 18 aa, Severe Acute Respiratory Syndrome coronavirus 2 (SARS-CoV-2)
EAPFLYLYALVYFLQSIN

SEQ ID NO: 1136 - protein, 18 aa, Severe Acute Respiratory Syndrome coronavirus 2 (SARS-CoV-2)
YALVYFLQSINFVRIIMR

SEQ ID NO: 1137 - protein, 18 aa, Severe Acute Respiratory Syndrome coronavirus 2 (SARS-CoV-2)
LQSINFVRIIMRLWLCWK

SEQ ID NO: 1138 - protein, 18 aa, Severe Acute Respiratory Syndrome coronavirus 2 (SARS-CoV-2)
CIPYNSVTSSIVITSGDG

SEQ ID NO: 1139 - protein, 16 aa, Severe Acute Respiratory Syndrome coronavirus 2 (SARS-CoV-2)
TSDYYQLYSTQLSTDT

SEQ ID NO: 1140 - protein, 17 aa, Severe Acute Respiratory Syndrome coronavirus 2 (SARS-CoV-2)
EILLIIMRTFKVSIWNL

SEQ ID NO: 1141 - protein, 23 aa, Severe Acute Respiratory Syndrome coronavirus 2 (SARS-CoV-2)
IWNLDYIINLIIKNLSKSLTENK

SEQ ID NO: 1142 - protein, 16 aa, Severe Acute Respiratory Syndrome coronavirus 2 (SARS-CoV-2)
MKIILFLALITLATCE

SEQ ID NO: 1143 - protein, 19 aa, Severe Acute Respiratory Syndrome coronavirus 2 (SARS-CoV-2)
PDGVKHVYQLRARSVSPKL

SEQ ID NO: 1144 - protein, 15 aa, Severe Acute Respiratory Syndrome coronavirus 2 (SARS-CoV-2)
QEEVQELYSPIFLIV

SEQ ID NO: 1145 - protein, 18 aa, Severe Acute Respiratory Syndrome coronavirus 2 (SARS-CoV-2)
YSPIFLIVAAIVFITLCF

SEQ ID NO: 1146 - protein, 17 aa, Severe Acute Respiratory Syndrome coronavirus 2 (SARS-CoV-2)
MKFLVFLGIITTVAAFH

SEQ ID NO: 1147 - protein, 15 aa, Severe Acute Respiratory Syndrome coronavirus 2 (SARS-CoV-2)
VAAFHQECSLQSCTQ

SEQ ID NO: 1148 - protein, 19 aa, Severe Acute Respiratory Syndrome coronavirus 2 (SARS-CoV-2)
YSKWYIRVGARKSAPLIEL

SEQ ID NO: 1149 - protein, 14 aa, Severe Acute Respiratory Syndrome coronavirus 2 (SARS-CoV-2)
MGYINVFAFPFTIY

SEQ ID NO: 1150 - protein, 22 aa, Severe Acute Respiratory Syndrome coronavirus 2 (SARS-CoV-2)
AFPFTIYSLLLCRMNSRNYIAQ

SEQ ID NO: 1151 - protein, 15 aa, Severe Acute Respiratory Syndrome coronavirus 2 (SARS-CoV-2)
EKSYELQTPFEIKLA

SEQ ID NO: 1152 - protein, 17 aa, Severe Acute Respiratory Syndrome coronavirus 2 (SARS-CoV-2)
QTPFEIKLAKKFDTFNG

SEQ ID NO: 1153 - protein, 15 aa, Severe Acute Respiratory Syndrome coronavirus 2 (SARS-CoV-2)
FDTFNGECPNFVFPL

SEQ ID NO: 1154 - protein, 20 aa, Severe Acute Respiratory Syndrome coronavirus 2 (SARS-CoV-2)
ECPNFVFPLNSIIKTIQPRV

SEQ ID NO: 1155 - protein, 15 aa, Severe Acute Respiratory Syndrome coronavirus 2 (SARS-CoV-2)
MGRIRSVYPVASPNE

SEQ ID NO: 1156 - protein, 15 aa, Severe Acute Respiratory Syndrome coronavirus 2 (SARS-CoV-2)
LAEYHNESGLKTILR

SEQ ID NO: 1157 - protein, 18 aa, Severe Acute Respiratory Syndrome coronavirus 2 (SARS-CoV-2)
DNLLEILQKEKVNINIVG

SEQ ID NO: 1158 - protein, 17 aa, Severe Acute Respiratory Syndrome coronavirus 2 (SARS-CoV-2)
VGDFKLNEEIAIILASF

SEQ ID NO: 1159 - protein, 18 aa, Severe Acute Respiratory Syndrome coronavirus 2 (SARS-CoV-2)
NEEIAIILASFSASTSAF

SEQ ID NO: 1160 - protein, 14 aa, Severe Acute Respiratory Syndrome coronavirus 2 (SARS-CoV-2)
ASFSASTSAFVETV

SEQ ID NO: 1161 - protein, 22 aa, Severe Acute Respiratory Syndrome coronavirus 2 (SARS-CoV-2)
AWNIGEQKSILSPLYAFASEAA

SEQ ID NO: 1162 - protein, 15 aa, Severe Acute Respiratory Syndrome coronavirus 2 (SARS-CoV-2)
ARVVRSIFSRTLETA

SEQ ID NO: 1163 - protein, 19 aa, Severe Acute Respiratory Syndrome coronavirus 2 (SARS-CoV-2)
QNSVRVLQKAAITILDGIS

SEQ ID NO: 1164 - protein, 16 aa, Severe Acute Respiratory Syndrome coronavirus 2 (SARS-CoV-2)
FGTVYEKLKPVLDWLE

SEQ ID NO: 1165 - protein, 18 aa, Severe Acute Respiratory Syndrome coronavirus 2 (SARS-CoV-2)
GWEIVKFISTCACEIVGG

SEQ ID NO: 1166 - protein, 15 aa, Severe Acute Respiratory Syndrome coronavirus 2 (SARS-CoV-2)
VQTFFKLVNKFLALC

SEQ ID NO: 1167 - protein, 16 aa, Severe Acute Respiratory Syndrome coronavirus 2 (SARS-CoV-2)
KLVNKFLALCADSIII

SEQ ID NO: 1168 - protein, 21 aa, Severe Acute Respiratory Syndrome coronavirus 2 (SARS-CoV-2)
DSIIIGGAKLKALNLGETFVT

SEQ ID NO: 1169 - protein, 15 aa, Severe Acute Respiratory Syndrome coronavirus 2 (SARS-CoV-2)
TEKYCALAPNMMVTN

SEQ ID NO: 1170 - protein, 17 aa, Severe Acute Respiratory Syndrome coronavirus 2 (SARS-CoV-2)
DDTVIEVQGYKSVNITF

SEQ ID NO: 1171 - protein, 15 aa, Severe Acute Respiratory Syndrome coronavirus 2 (SARS-CoV-2)
QTIEVNSFSGYLKLT

SEQ ID NO: 1172 - protein, 15 aa, Severe Acute Respiratory Syndrome coronavirus 2 (SARS-CoV-2)
SGYLKLTDNVYIKNA

SEQ ID NO: 1173 - protein, 16 aa, Severe Acute Respiratory Syndrome coronavirus 2 (SARS-CoV-2)
PTVVVNAANVYLKHGG

SEQ ID NO: 1174 - protein, 15 aa, Severe Acute Respiratory Syndrome coronavirus 2 (SARS-CoV-2)
AGALNKATNNAMQVE

SEQ ID NO: 1175 - protein, 18 aa, Severe Acute Respiratory Syndrome coronavirus 2 (SARS-CoV-2)
GEDIQLLKSAYENFNQHE

SEQ ID NO: 1176 - protein, 18 aa, Severe Acute Respiratory Syndrome coronavirus 2 (SARS-CoV-2)
NQHEVLLAPLLSAGIFGA

SEQ ID NO: 1177 - protein, 15 aa, Severe Acute Respiratory Syndrome coronavirus 2 (SARS-CoV-2)
KNLYDKLVSSFLEMK

SEQ ID NO: 1178 - protein, 15 aa, Severe Acute Respiratory Syndrome coronavirus 2 (SARS-CoV-2)
VSSFLEMKSEKQVEQ

SEQ ID NO: 1179 - protein, 16 aa, Severe Acute Respiratory Syndrome coronavirus 2 (SARS-CoV-2)
ETKFLTENLLLYIDIN

SEQ ID NO: 1180 - protein, 21 aa, Severe Acute Respiratory Syndrome coronavirus 2 (SARS-CoV-2)
TENLLLYIDINGNLHPDSATL

SEQ ID NO: 1181 - protein, 16 aa, Severe Acute Respiratory Syndrome coronavirus 2 (SARS-CoV-2)
DITFLKKDAPYIVGDV

SEQ ID NO: 1182 - protein, 16 aa, Severe Acute Respiratory Syndrome coronavirus 2 (SARS-CoV-2)
AKTVLKKCKSAFYILP

SEQ ID NO: 1183 - protein, 15 aa, Severe Acute Respiratory Syndrome coronavirus 2 (SARS-CoV-2)
KSAFYILPSIISNEK

SEQ ID NO: 1184 - protein, 18 aa, Severe Acute Respiratory Syndrome coronavirus 2 (SARS-CoV-2)
GARFYFYTSKTTVASLIN

SEQ ID NO: 1185 - protein, 18 aa, Severe Acute Respiratory Syndrome coronavirus 2 (SARS-CoV-2)
EEAARYMRSLKVPATVSV

SEQ ID NO: 1186 - protein, 19 aa, Severe Acute Respiratory Syndrome coronavirus 2 (SARS-CoV-2)
VTAYNGYLTSSSKTPEEHF

SEQ ID NO: 1187 - protein, 19 aa, Severe Acute Respiratory Syndrome coronavirus 2 (SARS-CoV-2)
EEHFIETISLAGSYKDWSY

SEQ ID NO: 1188 - protein, 20 aa, Severe Acute Respiratory Syndrome coronavirus 2 (SARS-CoV-2)
VITFDNLKTLLSLREVRTIK

SEQ ID NO: 1189 - protein, 14 aa, Severe Acute Respiratory Syndrome coronavirus 2 (SARS-CoV-2)
LSLREVRTIKVFTT

SEQ ID NO: 1190 - protein, 18 aa, Severe Acute Respiratory Syndrome coronavirus 2 (SARS-CoV-2)
GADVTKIKPHNSHEGKTF

SEQ ID NO: 1191 - protein, 18 aa, Severe Acute Respiratory Syndrome coronavirus 2 (SARS-CoV-2)
PSFLGRYMSALNHTKKWK

SEQ ID NO: 1192 - protein, 17 aa, Severe Acute Respiratory Syndrome coronavirus 2 (SARS-CoV-2)
LQQIELKFNPPALQDAY

SEQ ID NO: 1193 - protein, 15 aa, Severe Acute Respiratory Syndrome coronavirus 2 (SARS-CoV-2)
QDAYYRARAGEAANF

SEQ ID NO: 1194 - protein, 16 aa, Severe Acute Respiratory Syndrome coronavirus 2 (SARS-CoV-2)
FCALILAYCNKTVGEL

SEQ ID NO: 1195 - protein, 16 aa, Severe Acute Respiratory Syndrome coronavirus 2 (SARS-CoV-2)
TMSYLFQHANLDSCKR

SEQ ID NO: 1196 - protein, 17 aa, Severe Acute Respiratory Syndrome coronavirus 2 (SARS-CoV-2)
VEAVMYMGTLSYEQFKK

SEQ ID NO: 1197 - protein, 24 aa, Severe Acute Respiratory Syndrome coronavirus 2 (SARS-CoV-2)
TKYLVQQESPFVMMSAPPAQYELK

SEQ ID NO: 1198 - protein, 15 aa, Severe Acute Respiratory Syndrome coronavirus 2 (SARS-CoV-2)
CGHYKHITSKETLYC

SEQ ID NO: 1199 - protein, 15 aa, Severe Acute Respiratory Syndrome coronavirus 2 (SARS-CoV-2)
TDVFYKENSYTTTIK

SEQ ID NO: 1200 - protein, 17 aa, Severe Acute Respiratory Syndrome coronavirus 2 (SARS-CoV-2)
LDNYYKKDNSYFTEQPI

SEQ ID NO: 1201 - protein, 21 aa, Severe Acute Respiratory Syndrome coronavirus 2 (SARS-CoV-2)
ADDLNQLTGYKKPASRELKVT

SEQ ID NO: 1202 - protein, 17 aa, Severe Acute Respiratory Syndrome coronavirus 2 (SARS-CoV-2)
AIDYKHYTPSFKKGAKL

SEQ ID NO: 1203 - protein, 19 aa, Severe Acute Respiratory Syndrome coronavirus 2 (SARS-CoV-2)
HKPIVWHVNNATNKATYKP

SEQ ID NO: 1204 - protein, 17 aa, Severe Acute Respiratory Syndrome coronavirus 2 (SARS-CoV-2)
VGDIILKPANNSLKITE

SEQ ID NO: 1205 - protein, 17 aa, Severe Acute Respiratory Syndrome coronavirus 2 (SARS-CoV-2)
PNELSRVLGLKTLATHG

SEQ ID NO: 1206 - protein, 14 aa, Severe Acute Respiratory Syndrome coronavirus 2 (SARS-CoV-2)
LGLKTLATHGLAAV

SEQ ID NO: 1207 - protein, 19 aa, Severe Acute Respiratory Syndrome coronavirus 2 (SARS-CoV-2)
AKPFLNKVVSTTTNIVTRC

SEQ ID NO: 1208 - protein, 15 aa, Severe Acute Respiratory Syndrome coronavirus 2 (SARS-CoV-2)
TRCLNRVCTNYMPYF

SEQ ID NO: 1209 - protein, 20 aa, Severe Acute Respiratory Syndrome coronavirus 2 (SARS-CoV-2)
YMPYFFTLLLQLCTFTRSTN

SEQ ID NO: 1210 - protein, 15 aa, Severe Acute Respiratory Syndrome coronavirus 2 (SARS-CoV-2)
LCTFTRSTNSRIKAS

SEQ ID NO: 1211 - protein, 15 aa, Severe Acute Respiratory Syndrome coronavirus 2 (SARS-CoV-2)
NSRIKASMPTTIAKN

SEQ ID NO: 1212 - protein, 22 aa, Severe Acute Respiratory Syndrome coronavirus 2 (SARS-CoV-2)
KFCLEASFNYLKSPNFSKLINI

SEQ ID NO: 1213 - protein, 15 aa, Severe Acute Respiratory Syndrome coronavirus 2 (SARS-CoV-2)
SPNFSKLINIIIWFL

SEQ ID NO: 1214 - protein, 21 aa, Severe Acute Respiratory Syndrome coronavirus 2 (SARS-CoV-2)
LINIIIWFLLLSVCLGSLIYS

SEQ ID NO: 1215 - protein, 25 aa, Severe Acute Respiratory Syndrome coronavirus 2 (SARS-CoV-2)
LGSLIYSTAALGVLMSNLGMPSYCT

SEQ ID NO: 1216 - protein, 16 aa, Severe Acute Respiratory Syndrome coronavirus 2 (SARS-CoV-2)
REGYLNSTNVTIATYC

SEQ ID NO: 1217 - protein, 15 aa, Severe Acute Respiratory Syndrome coronavirus 2 (SARS-CoV-2)
ISSFKWDLTAFGLVA

SEQ ID NO: 1218 - protein, 17 aa, Severe Acute Respiratory Syndrome coronavirus 2 (SARS-CoV-2)
FLAYILFTRFFYVLGLA

SEQ ID NO: 1219 - protein, 17 aa, Severe Acute Respiratory Syndrome coronavirus 2 (SARS-CoV-2)
TRFFYVLGLAAIMQLFF

SEQ ID NO: 1220 - protein, 19 aa, Severe Acute Respiratory Syndrome coronavirus 2 (SARS-CoV-2)
AAIMQLFFSYFAVHFISNS

SEQ ID NO: 1221 - protein, 17 aa, Severe Acute Respiratory Syndrome coronavirus 2 (SARS-CoV-2)
YFAVHFISNSWLMWLII

SEQ ID NO: 1222 - protein, 23 aa, Severe Acute Respiratory Syndrome coronavirus 2 (SARS-CoV-2)
NSWLMWLIINLVQMAPISAMVRM

SEQ ID NO: 1223 - protein, 24 aa, Severe Acute Respiratory Syndrome coronavirus 2 (SARS-CoV-2)
MAPISAMVRMYIFFASFYYVWKSY

SEQ ID NO: 1224 - protein, 19 aa, Severe Acute Respiratory Syndrome coronavirus 2 (SARS-CoV-2)
FASFYYVWKSYVHVVDGCN

SEQ ID NO: 1225 - protein, 15 aa, Severe Acute Respiratory Syndrome coronavirus 2 (SARS-CoV-2)
MMCYKRNRATRVECT

SEQ ID NO: 1226 - protein, 19 aa, Severe Acute Respiratory Syndrome coronavirus 2 (SARS-CoV-2)
TTIVNGVRRSFYVYANGGK

SEQ ID NO: 1227 - protein, 15 aa, Severe Acute Respiratory Syndrome coronavirus 2 (SARS-CoV-2)
RSFYVYANGGKGFCK

SEQ ID NO: 1228 - protein, 23 aa, Severe Acute Respiratory Syndrome coronavirus 2 (SARS-CoV-2)
SDEVARDLSLQFKRPINPTDQSS

SEQ ID NO: 1229 - protein, 21 aa, Severe Acute Respiratory Syndrome coronavirus 2 (SARS-CoV-2)
LSHFVNLDNLRANNTKGSLPI

SEQ ID NO: 1230 - protein, 15 aa, Severe Acute Respiratory Syndrome coronavirus 2 (SARS-CoV-2)
QPILLLDQALVSDVG

SEQ ID NO: 1231 - protein, 22 aa, Severe Acute Respiratory Syndrome coronavirus 2 (SARS-CoV-2)
VKMFDAYVNTFSSTFNVPMEKL

SEQ ID NO: 1232 - protein, 15 aa, Severe Acute Respiratory Syndrome coronavirus 2 (SARS-CoV-2)
LSTFISAARQGFVDS

SEQ ID NO: 1233 - protein, 19 aa, Severe Acute Respiratory Syndrome coronavirus 2 (SARS-CoV-2)
ARHINAQVAKSHNIALIWN

SEQ ID NO: 1234 - protein, 20 aa, Severe Acute Respiratory Syndrome coronavirus 2 (SARS-CoV-2)
SEQLRKQIRSAAKKNNLPFK

SEQ ID NO: 1235 - protein, 15 aa, Severe Acute Respiratory Syndrome coronavirus 2 (SARS-CoV-2)
NLPFKLTCATTRQVV

SEQ ID NO: 1236 - protein, 17 aa, Severe Acute Respiratory Syndrome coronavirus 2 (SARS-CoV-2)
TRQVVNVVTTKIALKGG

SEQ ID NO: 1237 - protein, 30 aa, Severe Acute Respiratory Syndrome coronavirus 2 (SARS-CoV-2)
KIVNNWLKQLIKVTLVFLFVAAIFYLITPV

SEQ ID NO: 1238 - protein, 17 aa, Severe Acute Respiratory Syndrome coronavirus 2 (SARS-CoV-2)
VAAIFYLITPVHVMSKH

SEQ ID NO: 1239 - protein, 23 aa, Severe Acute Respiratory Syndrome coronavirus 2 (SARS-CoV-2)
NGDFLHFLPRVFSAVGNICYTPS

SEQ ID NO: 1240 - protein, 16 aa, Severe Acute Respiratory Syndrome coronavirus 2 (SARS-CoV-2)
DTRYVLMDGSIIQFPN

SEQ ID NO: 1241 - protein, 16 aa, Severe Acute Respiratory Syndrome coronavirus 2 (SARS-CoV-2)
DGSIIQFPNTYLEGSV

SEQ ID NO: 1242 - protein, 22 aa, Severe Acute Respiratory Syndrome coronavirus 2 (SARS-CoV-2)
SGRWVLNNDYYRSLPGVFCGVD

SEQ ID NO: 1243 - protein, 22 aa, Severe Acute Respiratory Syndrome coronavirus 2 (SARS-CoV-2)
VDAVNLLTNMFTPLIQPIGALD

SEQ ID NO: 1244 - protein, 16 aa, Severe Acute Respiratory Syndrome coronavirus 2 (SARS-CoV-2)
CLAYYFMRFRRAFGEY

SEQ ID NO: 1245 - protein, 14 aa, Severe Acute Respiratory Syndrome coronavirus 2 (SARS-CoV-2)
MRFRRAFGEYSHVV

SEQ ID NO: 1246 - protein, 20 aa, Severe Acute Respiratory Syndrome coronavirus 2 (SARS-CoV-2)
VAFNTLLFLMSFTVLCLTPV

SEQ ID NO: 1247 - protein, 27 aa, Severe Acute Respiratory Syndrome coronavirus 2 (SARS-CoV-2)
LPGVYSVIYLYLTFYLTNDVSFLAHIQ

SEQ ID NO: 1248 - protein, 19 aa, Severe Acute Respiratory Syndrome coronavirus 2 (SARS-CoV-2)
HIQWMVMFTPLVPFWITIA

SEQ ID NO: 1249 - protein, 15 aa, Severe Acute Respiratory Syndrome coronavirus 2 (SARS-CoV-2)
LVPFWITIAYIICIS

SEQ ID NO: 1250 - protein, 19 aa, Severe Acute Respiratory Syndrome coronavirus 2 (SARS-CoV-2)
TKHFYWFFSNYLKRRVVFN

SEQ ID NO: 1251 - protein, 22 aa, Severe Acute Respiratory Syndrome coronavirus 2 (SARS-CoV-2)
FSNYLKRRVVFNGVSFSTFEEA

SEQ ID NO: 1252 - protein, 17 aa, Severe Acute Respiratory Syndrome coronavirus 2 (SARS-CoV-2)
LCTFLLNKEMYLKLRSD

SEQ ID NO: 1253 - protein, 18 aa, Severe Acute Respiratory Syndrome coronavirus 2 (SARS-CoV-2)
KEMYLKLRSDVLLPLTQY

SEQ ID NO: 1254 - protein, 24 aa, Severe Acute Respiratory Syndrome coronavirus 2 (SARS-CoV-2)
LLPLTQYNRYLALYNKYKYFSGAM

SEQ ID NO: 1255 - protein, 19 aa, Severe Acute Respiratory Syndrome coronavirus 2 (SARS-CoV-2)
YEDLLIRKSNHNFLVQAGN

SEQ ID NO: 1256 - protein, 16 aa, Severe Acute Respiratory Syndrome coronavirus 2 (SARS-CoV-2)
NHNFLVQAGNVQLRVI

SEQ ID NO: 1257 - protein, 17 aa, Severe Acute Respiratory Syndrome coronavirus 2 (SARS-CoV-2)
TPKYKFVRIQPGQTFSV

SEQ ID NO: 1258 - protein, 25 aa, Severe Acute Respiratory Syndrome coronavirus 2 (SARS-CoV-2)
SGVYQCAMRPNFTIKGSFLNGSCGS

SEQ ID NO: 1259 - protein, 16 aa, Severe Acute Respiratory Syndrome coronavirus 2 (SARS-CoV-2)
DRWFLNRFTTTLNDFN

SEQ ID NO: 1260 - protein, 27 aa, Severe Acute Respiratory Syndrome coronavirus 2 (SARS-CoV-2)
KRTIKGTHHWLLLTILTSLLVLVQSTQ

SEQ ID NO: 1261 - protein, 19 aa, Severe Acute Respiratory Syndrome coronavirus 2 (SARS-CoV-2)
WSLFFFLYENAFLPFAMGI

SEQ ID NO: 1262 - protein, 21 aa, Severe Acute Respiratory Syndrome coronavirus 2 (SARS-CoV-2)
AMGIIAMSAFAMMFVKHKHAF

SEQ ID NO: 1263 - protein, 15 aa, Severe Acute Respiratory Syndrome coronavirus 2 (SARS-CoV-2)
AMMFVKHKHAFLCLF

SEQ ID NO: 1264 - protein, 20 aa, Severe Acute Respiratory Syndrome coronavirus 2 (SARS-CoV-2)
KHAFLCLFLLPSLATVAYFN

SEQ ID NO: 1265 - protein, 18 aa, Severe Acute Respiratory Syndrome coronavirus 2 (SARS-CoV-2)
TVAYFNMVYMPASWVMRI

SEQ ID NO: 1266 - protein, 17 aa, Severe Acute Respiratory Syndrome coronavirus 2 (SARS-CoV-2)
KDCVMYASAVVLLILMT

SEQ ID NO: 1267 - protein, 16 aa, Severe Acute Respiratory Syndrome coronavirus 2 (SARS-CoV-2)
AVVLLILMTARTVYDD

SEQ ID NO: 1268 - protein, 22 aa, Severe Acute Respiratory Syndrome coronavirus 2 (SARS-CoV-2)
ARRVWTLMNVLTLVYKVYYGNA

SEQ ID NO: 1269 - protein, 15 aa, Severe Acute Respiratory Syndrome coronavirus 2 (SARS-CoV-2)
TLVYKVYYGNALDQA

SEQ ID NO: 1270 - protein, 21 aa, Severe Acute Respiratory Syndrome coronavirus 2 (SARS-CoV-2)
ISMWALIISVTSNYSGVVTTV

SEQ ID NO: 1271 - protein, 16 aa, Severe Acute Respiratory Syndrome coronavirus 2 (SARS-CoV-2)
YCPIFFITGNTLQCIM

SEQ ID NO: 1272 - protein, 26 aa, Severe Acute Respiratory Syndrome coronavirus 2 (SARS-CoV-2)
CTCYFGLFCLLNRYFRLTLGVYDYLV

SEQ ID NO: 1273 - protein, 17 aa, Severe Acute Respiratory Syndrome coronavirus 2 (SARS-CoV-2)
TQEFRYMNSQGLLPPKN

SEQ ID NO: 1274 - protein, 19 aa, Severe Acute Respiratory Syndrome coronavirus 2 (SARS-CoV-2)
IDAFKLNIKLLGVGGKPCI

SEQ ID NO: 1275 - protein, 26 aa, Severe Acute Respiratory Syndrome coronavirus 2 (SARS-CoV-2)
CTSVVLLSVLQQLRVESSSKLWAQCV

SEQ ID NO: 1276 - protein, 25 aa, Severe Acute Respiratory Syndrome coronavirus 2 (SARS-CoV-2)
TEAFEKMVSLLSVLLSMQGAVDINK

SEQ ID NO: 1277 - protein, 15 aa, Severe Acute Respiratory Syndrome coronavirus 2 (SARS-CoV-2)
ASEFSSLPSYAAFAT

SEQ ID NO: 1278 - protein, 21 aa, Severe Acute Respiratory Syndrome coronavirus 2 (SARS-CoV-2)
DSEVVLKKLKKSLNVAKSEFD

SEQ ID NO: 1279 - protein, 19 aa, Severe Acute Respiratory Syndrome coronavirus 2 (SARS-CoV-2)
DQAMTQMYKQARSEDKRAK

SEQ ID NO: 1280 - protein, 15 aa, Severe Acute Respiratory Syndrome coronavirus 2 (SARS-CoV-2)
TMLFTMLRKLDNDAL

SEQ ID NO: 1281 - protein, 19 aa, Severe Acute Respiratory Syndrome coronavirus 2 (SARS-CoV-2)
NDALNNIINNARDGCVPLN

SEQ ID NO: 1282 - protein, 18 aa, Severe Acute Respiratory Syndrome coronavirus 2 (SARS-CoV-2)
PLNIIPLTTAAKLMVVIP

SEQ ID NO: 1283 - protein, 17 aa, Severe Acute Respiratory Syndrome coronavirus 2 (SARS-CoV-2)
WPLIVTALRANSAVKLQ

SEQ ID NO: 1284 - protein, 18 aa, Severe Acute Respiratory Syndrome coronavirus 2 (SARS-CoV-2)
TKGGRFVLALLSDLQDLK

SEQ ID NO: 1285 - protein, 14 aa, Severe Acute Respiratory Syndrome coronavirus 2 (SARS-CoV-2)
KVKYLYFIKGLNNL

SEQ ID NO: 1286 - protein, 14 aa, Severe Acute Respiratory Syndrome coronavirus 2 (SARS-CoV-2)
LYFIKGLNNLNRGM

SEQ ID NO: 1287 - protein, 17 aa, Severe Acute Respiratory Syndrome coronavirus 2 (SARS-CoV-2)
KGLNNLNRGMVLGSLAA

SEQ ID NO: 1288 - protein, 15 aa, Severe Acute Respiratory Syndrome coronavirus 2 (SARS-CoV-2)
RGMVLGSLAATVRLQ

SEQ ID NO: 1289 - protein, 15 aa, Severe Acute Respiratory Syndrome coronavirus 2 (SARS-CoV-2)
TNCVKMLCTHTGTGQ

SEQ ID NO: 1290 - protein, 19 aa, Severe Acute Respiratory Syndrome coronavirus 2 (SARS-CoV-2)
IDSYFVVKRHTFSNYQHEE

SEQ ID NO: 1291 - protein, 17 aa, Severe Acute Respiratory Syndrome coronavirus 2 (SARS-CoV-2)
ETIYNLLKDCPAVAKHD

SEQ ID NO: 1292 - protein, 16 aa, Severe Acute Respiratory Syndrome coronavirus 2 (SARS-CoV-2)
NPDILRVYANLGERVR

SEQ ID NO: 1293 - protein, 18 aa, Severe Acute Respiratory Syndrome coronavirus 2 (SARS-CoV-2)
VDSYYSLLMPILTLTRAL

SEQ ID NO: 1294 - protein, 17 aa, Severe Acute Respiratory Syndrome coronavirus 2 (SARS-CoV-2)
MPILTLTRALTAESHVD

SEQ ID NO: 1295 - protein, 15 aa, Severe Acute Respiratory Syndrome coronavirus 2 (SARS-CoV-2)
DQTYHPNCVNCLDDR

SEQ ID NO: 1296 - protein, 24 aa, Severe Acute Respiratory Syndrome coronavirus 2 (SARS-CoV-2)
RCILHCANFNVLFSTVFPPTSFGP

SEQ ID NO: 1297 - protein, 17 aa, Severe Acute Respiratory Syndrome coronavirus 2 (SARS-CoV-2)
HNQDVNLHSSRLSFKEL

SEQ ID NO: 1298 - protein, 14 aa, Severe Acute Respiratory Syndrome coronavirus 2 (SARS-CoV-2)
LSFKELLVYAADPA

SEQ ID NO: 1299 - protein, 15 aa, Severe Acute Respiratory Syndrome coronavirus 2 (SARS-CoV-2)
DPAMHAASGNLLLDK

SEQ ID NO: 1300 - protein, 21 aa, Severe Acute Respiratory Syndrome coronavirus 2 (SARS-CoV-2)
ITQMNLKYAISAKNRARTVAG

SEQ ID NO: 1301 - protein, 20 aa, Severe Acute Respiratory Syndrome coronavirus 2 (SARS-CoV-2)
NRQFHQKLLKSIAATRGATV

SEQ ID NO: 1302 - protein, 20 aa, Severe Acute Respiratory Syndrome coronavirus 2 (SARS-CoV-2)
TSKFYGGWHNMLKTVYSDVE

SEQ ID NO: 1303 - protein, 18 aa, Severe Acute Respiratory Syndrome coronavirus 2 (SARS-CoV-2)
MPNMLRIMASLVLARKHT

SEQ ID NO: 1304 - protein, 15 aa, Severe Acute Respiratory Syndrome coronavirus 2 (SARS-CoV-2)
MASLVLARKHTTCCS

SEQ ID NO: 1305 - protein, 16 aa, Severe Acute Respiratory Syndrome coronavirus 2 (SARS-CoV-2)
SHRFYRLANECAQVLS

SEQ ID NO: 1306 - protein, 19 aa, Severe Acute Respiratory Syndrome coronavirus 2 (SARS-CoV-2)
VFNICQAVTANVNALLSTD

SEQ ID NO: 1307 - protein, 18 aa, Severe Acute Respiratory Syndrome coronavirus 2 (SARS-CoV-2)
TANVNALLSTDGNKIADK

SEQ ID NO: 1308 - protein, 16 aa, Severe Acute Respiratory Syndrome coronavirus 2 (SARS-CoV-2)
ADKYVRNLQHRLYECL

SEQ ID NO: 1309 - protein, 23 aa, Severe Acute Respiratory Syndrome coronavirus 2 (SARS-CoV-2)
DTDFVNEFYAYLRKHFSMMILSD

SEQ ID NO: 1310 - protein, 18 aa, Severe Acute Respiratory Syndrome coronavirus 2 (SARS-CoV-2)
DDAVVCFNSTYASQGLVA

SEQ ID NO: 1311 - protein, 23 aa, Severe Acute Respiratory Syndrome coronavirus 2 (SARS-CoV-2)
VASIKNFKSVLYYQNNVFMSEAK

SEQ ID NO: 1312 - protein, 15 aa, Severe Acute Respiratory Syndrome coronavirus 2 (SARS-CoV-2)
PHEFCSQHTMLVKQG

SEQ ID NO: 1313 - protein, 15 aa, Severe Acute Respiratory Syndrome coronavirus 2 (SARS-CoV-2)
TLMIERFVSLAIDAY

SEQ ID NO: 1314 - protein, 22 aa, Severe Acute Respiratory Syndrome coronavirus 2 (SARS-CoV-2)
ADVFHLYLQYIRKLHDELTGHM

SEQ ID NO: 1315 - protein, 23 aa, Severe Acute Respiratory Syndrome coronavirus 2 (SARS-CoV-2)
TGHMLDMYSVMLTNDNTSRYWEP

SEQ ID NO: 1316 - protein, 17 aa, Severe Acute Respiratory Syndrome coronavirus 2 (SARS-CoV-2)
CYDHVISTSHKLVLSVN

SEQ ID NO: 1317 - protein, 16 aa, Severe Acute Respiratory Syndrome coronavirus 2 (SARS-CoV-2)
SHKLVLSVNPYVCNAP

SEQ ID NO: 1318 - protein, 19 aa, Severe Acute Respiratory Syndrome coronavirus 2 (SARS-CoV-2)
NGQVFGLYKNTCVGSDNVT

SEQ ID NO: 1319 - protein, 17 aa, Severe Acute Respiratory Syndrome coronavirus 2 (SARS-CoV-2)
TERLKLFAAETLKATEE

SEQ ID NO: 1320 - protein, 19 aa, Severe Acute Respiratory Syndrome coronavirus 2 (SARS-CoV-2)
EETFKLSYGIATVREVLSD

SEQ ID NO: 1321 - protein, 17 aa, Severe Acute Respiratory Syndrome coronavirus 2 (SARS-CoV-2)
FTGYRVTKNSKVQIGEY

SEQ ID NO: 1322 - protein, 16 aa, Severe Acute Respiratory Syndrome coronavirus 2 (SARS-CoV-2)
AVVYRGTTTYKLNVGD

SEQ ID NO: 1323 - protein, 16 aa, Severe Acute Respiratory Syndrome coronavirus 2 (SARS-CoV-2)
VGDYFVLTSHTVMPLS

SEQ ID NO: 1324 - protein, 15 aa, Severe Acute Respiratory Syndrome coronavirus 2 (SARS-CoV-2)
SHTVMPLSAPTLVPQ

SEQ ID NO: 1325 - protein, 18 aa, Severe Acute Respiratory Syndrome coronavirus 2 (SARS-CoV-2)
QEHYVRITGLYPTLNISD

SEQ ID NO: 1326 - protein, 15 aa, Severe Acute Respiratory Syndrome coronavirus 2 (SARS-CoV-2)
SDEFSSNVANYQKVG

SEQ ID NO: 1327 - protein, 18 aa, Severe Acute Respiratory Syndrome coronavirus 2 (SARS-CoV-2)
KVGMQKYSTLQGPPGTGK

SEQ ID NO: 1328 - protein, 14 aa, Severe Acute Respiratory Syndrome coronavirus 2 (SARS-CoV-2)
VECFDKFKVNSTLE

SEQ ID NO: 1329 - protein, 14 aa, Severe Acute Respiratory Syndrome coronavirus 2 (SARS-CoV-2)
DKFKVNSTLEQYVF

SEQ ID NO: 1330 - protein, 23 aa, Severe Acute Respiratory Syndrome coronavirus 2 (SARS-CoV-2)
ATNYDLSVVNARLRAKHYVYIGD

SEQ ID NO: 1331 - protein, 15 aa, Severe Acute Respiratory Syndrome coronavirus 2 (SARS-CoV-2)
EPEYFNSVCRLMKTI

SEQ ID NO: 1332 - protein, 27 aa, Severe Acute Respiratory Syndrome coronavirus 2 (SARS-CoV-2)
AQCFKMFYKGVITHDVSSAINRPQIGV

SEQ ID NO: 1333 - protein, 22 aa, Severe Acute Respiratory Syndrome coronavirus 2 (SARS-CoV-2)
RKAVFISPYNSQNAVASKILGL

SEQ ID NO: 1334 - protein, 22 aa, Severe Acute Respiratory Syndrome coronavirus 2 (SARS-CoV-2)
SCNVNRFNVAITRAKVGILCIM

SEQ ID NO: 1335 - protein, 18 aa, Severe Acute Respiratory Syndrome coronavirus 2 (SARS-CoV-2)
DMTYRRLISMMGFKMNYQ

SEQ ID NO: 1336 - protein, 25 aa, Severe Acute Respiratory Syndrome coronavirus 2 (SARS-CoV-2)
NLPLQLGFSTGVNLVAVPTGYVDTP

SEQ ID NO: 1337 - protein, 23 aa, Severe Acute Respiratory Syndrome coronavirus 2 (SARS-CoV-2)
GDQFKHLIPLMYKGLPWNVVRIK

SEQ ID NO: 1338 - protein, 22 aa, Severe Acute Respiratory Syndrome coronavirus 2 (SARS-CoV-2)
GLPWNVVRIKIVQMLSDTLKNL

SEQ ID NO: 1339 - protein, 23 aa, Severe Acute Respiratory Syndrome coronavirus 2 (SARS-CoV-2)
ELKINAACRKVQHMVVKAALLAD

SEQ ID NO: 1340 - protein, 16 aa, Severe Acute Respiratory Syndrome coronavirus 2 (SARS-CoV-2)
FDTRVLSNLNLPGCDG

SEQ ID NO: 1341 - protein, 16 aa, Severe Acute Respiratory Syndrome coronavirus 2 (SARS-CoV-2)
GGSLYVNKHAFHTPAF

SEQ ID NO: 1342 - protein, 15 aa, Severe Acute Respiratory Syndrome coronavirus 2 (SARS-CoV-2)
SAFVNLKQLPFFYYS

SEQ ID NO: 1343 - protein, 18 aa, Severe Acute Respiratory Syndrome coronavirus 2 (SARS-CoV-2)
DIDYVPLKSATCITRCNL

SEQ ID NO: 1344 - protein, 19 aa, Severe Acute Respiratory Syndrome coronavirus 2 (SARS-CoV-2)
LDAYNMMISAGFSLWVYKQ

SEQ ID NO: 1345 - protein, 17 aa, Severe Acute Respiratory Syndrome coronavirus 2 (SARS-CoV-2)
LENVAFNVVNKGHFDGQ

SEQ ID NO: 1346 - protein, 18 aa, Severe Acute Respiratory Syndrome coronavirus 2 (SARS-CoV-2)
PVPEVKILNNLGVDIAAN

SEQ ID NO: 1347 - protein, 15 aa, Severe Acute Respiratory Syndrome coronavirus 2 (SARS-CoV-2)
IWDYKRDAPAHISTI

SEQ ID NO: 1348 - protein, 16 aa, Severe Acute Respiratory Syndrome coronavirus 2 (SARS-CoV-2)
QVDLFRNARNGVLITE

SEQ ID NO: 1349 - protein, 18 aa, Severe Acute Respiratory Syndrome coronavirus 2 (SARS-CoV-2)
EGSVKGLQPSVGPKQASL

SEQ ID NO: 1350 - protein, 22 aa, Severe Acute Respiratory Syndrome coronavirus 2 (SARS-CoV-2)
PETYFTQSRNLQEFKPRSQMEI

SEQ ID NO: 1351 - protein, 27 aa, Severe Acute Respiratory Syndrome coronavirus 2 (SARS-CoV-2)
YGDFSHSQLGGLHLLIGLAKRFKESPF

SEQ ID NO: 1352 - protein, 17 aa, Severe Acute Respiratory Syndrome coronavirus 2 (SARS-CoV-2)
DDFVEIIKSQDLSVVSK

SEQ ID NO: 1353 - protein, 16 aa, Severe Acute Respiratory Syndrome coronavirus 2 (SARS-CoV-2)
MPNLYKMQRMLLEKCD

SEQ ID NO: 1354 - protein, 15 aa, Severe Acute Respiratory Syndrome coronavirus 2 (SARS-CoV-2)
VAKYTQLCQYLNTLT

SEQ ID NO: 1355 - protein, 15 aa, Severe Acute Respiratory Syndrome coronavirus 2 (SARS-CoV-2)
LNTLTLAVPYNMRVI

SEQ ID NO: 1356 - protein, 15 aa, Severe Acute Respiratory Syndrome coronavirus 2 (SARS-CoV-2)
GTAVLRQWLPTGTLL

SEQ ID NO: 1357 - protein, 15 aa, Severe Acute Respiratory Syndrome coronavirus 2 (SARS-CoV-2)
EGFFTYICGFIQQKL

SEQ ID NO: 1358 - protein, 18 aa, Severe Acute Respiratory Syndrome coronavirus 2 (SARS-CoV-2)
ICGFIQQKLALGGSVAIK

SEQ ID NO: 1359 - protein, 15 aa, Severe Acute Respiratory Syndrome coronavirus 2 (SARS-CoV-2)
ADLYKLMGHFAWWTA

SEQ ID NO: 1360 - protein, 15 aa, Severe Acute Respiratory Syndrome coronavirus 2 (SARS-CoV-2)
HFAWWTAFVTNVNAS

SEQ ID NO: 1361 - protein, 18 aa, Severe Acute Respiratory Syndrome coronavirus 2 (SARS-CoV-2)
TAFVTNVNASSSEAFLIG

SEQ ID NO: 1362 - protein, 15 aa, Severe Acute Respiratory Syndrome coronavirus 2 (SARS-CoV-2)
SEAFLIGCNYLGKPR

SEQ ID NO: 1363 - protein, 17 aa, Severe Acute Respiratory Syndrome coronavirus 2 (SARS-CoV-2)
ANYIFWRNTNPIQLSSY

SEQ ID NO: 1364 - protein, 19 aa, Severe Acute Respiratory Syndrome coronavirus 2 (SARS-CoV-2)
INDMILSLLSKGRLIIREN

SEQ ID NO: 1365 - protein, 17 aa, Severe Acute Respiratory Syndrome coronavirus 2 (SARS-CoV-2)
KGRLIIRENNRVVISSD

SEQ ID NO: 1366 - protein, 9 aa, Severe Acute Respiratory Syndrome coronavirus 2 (SARS-CoV-2)
FVSEETGTL

SEQ ID NO: 1367 - protein, 12 aa, Severe Acute Respiratory Syndrome coronavirus 2 (SARS-CoV-2)
GTLIVNSVLLFL

SEQ ID NO: 1368 - protein, 15 aa, Severe Acute Respiratory Syndrome coronavirus 2 (SARS-CoV-2)
VLLFLAFVVFLLVTL

SEQ ID NO: 1369 - protein, 11 aa, Severe Acute Respiratory Syndrome coronavirus 2 (SARS-CoV-2)
YVYSRVKNLNS

SEQ ID NO: 1370 - protein, 10 aa, Severe Acute Respiratory Syndrome coronavirus 2 (SARS-CoV-2)
RVKNLNSSRV

SEQ ID NO: 1371 - protein, 9 aa, Severe Acute Respiratory Syndrome coronavirus 2 (SARS-CoV-2)
LLEQWNLVI

SEQ ID NO: 1372 - protein, 9 aa, Severe Acute Respiratory Syndrome coronavirus 2 (SARS-CoV-2)
WNLVIGFLF

SEQ ID NO: 1373 - protein, 10 aa, Severe Acute Respiratory Syndrome coronavirus 2 (SARS-CoV-2)
LQFAYANRNR

SEQ ID NO: 1374 - protein, 12 aa, Severe Acute Respiratory Syndrome coronavirus 2 (SARS-CoV-2)
FLYIIKLIFLWL

SEQ ID NO: 1375 - protein, 9 aa, Severe Acute Respiratory Syndrome coronavirus 2 (SARS-CoV-2)
FVLAAVYRI

SEQ ID NO: 1376 - protein, 9 aa, Severe Acute Respiratory Syndrome coronavirus 2 (SARS-CoV-2)
FIASFRLFA

SEQ ID NO: 1377 - protein, 11 aa, Severe Acute Respiratory Syndrome coronavirus 2 (SARS-CoV-2)
FRLFARTRSMW

SEQ ID NO: 1378 - protein, 8 aa, Severe Acute Respiratory Syndrome coronavirus 2 (SARS-CoV-2)
FNPETNIL

SEQ ID NO: 1379 - protein, 9 aa, Severe Acute Respiratory Syndrome coronavirus 2 (SARS-CoV-2)
ILLNVPLHG

SEQ ID NO: 1380 - protein, 9 aa, Severe Acute Respiratory Syndrome coronavirus 2 (SARS-CoV-2)
LRIAGHHLG

SEQ ID NO: 1381 - protein, 9 aa, Severe Acute Respiratory Syndrome coronavirus 2 (SARS-CoV-2)
ITVATSRTL

SEQ ID NO: 1382 - protein, 10 aa, Severe Acute Respiratory Syndrome coronavirus 2 (SARS-CoV-2)
YYKLGASQRV

SEQ ID NO: 1383 - protein, 11 aa, Severe Acute Respiratory Syndrome coronavirus 2 (SARS-CoV-2)
YKLNTDHSSSS

SEQ ID NO: 1384 - protein, 11 aa, Severe Acute Respiratory Syndrome coronavirus 2 (SARS-CoV-2)
FVFLVLLPLVS

SEQ ID NO: 1385 - protein, 9 aa, Severe Acute Respiratory Syndrome coronavirus 2 (SARS-CoV-2)
YTNSFTRGV

SEQ ID NO: 1386 - protein, 9 aa, Severe Acute Respiratory Syndrome coronavirus 2 (SARS-CoV-2)
FRSSVLHST

SEQ ID NO: 1387 - protein, 9 aa, Severe Acute Respiratory Syndrome coronavirus 2 (SARS-CoV-2)
FLPFFSNVT

SEQ ID NO: 1388 - protein, 10 aa, Severe Acute Respiratory Syndrome coronavirus 2 (SARS-CoV-2)
WFHAIHVSGT

SEQ ID NO: 1389 - protein, 11 aa, Severe Acute Respiratory Syndrome coronavirus 2 (SARS-CoV-2)
VYFASTEKSNI

SEQ ID NO: 1390 - protein, 12 aa, Severe Acute Respiratory Syndrome coronavirus 2 (SARS-CoV-2)
LLIVNNATNVVI

SEQ ID NO: 1391 - protein, 11 aa, Severe Acute Respiratory Syndrome coronavirus 2 (SARS-CoV-2)
VYYHKNNKSWM

SEQ ID NO: 1392 - protein, 12 aa, Severe Acute Respiratory Syndrome coronavirus 2 (SARS-CoV-2)
FRVYSSANNCTF

SEQ ID NO: 1393 - protein, 9 aa, Severe Acute Respiratory Syndrome coronavirus 2 (SARS-CoV-2)
FKIYSKHTP

SEQ ID NO: 1394 - protein, 9 aa, Severe Acute Respiratory Syndrome coronavirus 2 (SARS-CoV-2)
INLVRDLPQ

SEQ ID NO: 1395 - protein, 12 aa, Severe Acute Respiratory Syndrome coronavirus 2 (SARS-CoV-2)
ITRFQTLLALHR

SEQ ID NO: 1396 - protein, 12 aa, Severe Acute Respiratory Syndrome coronavirus 2 (SARS-CoV-2)
LLALHRSYLTPG

SEQ ID NO: 1397 - protein, 11 aa, Severe Acute Respiratory Syndrome coronavirus 2 (SARS-CoV-2)
FLLKYNENGTI

SEQ ID NO: 1398 - protein, 9 aa, Severe Acute Respiratory Syndrome coronavirus 2 (SARS-CoV-2)
FRVQPTESI

SEQ ID NO: 1399 - protein, 9 aa, Severe Acute Respiratory Syndrome coronavirus 2 (SARS-CoV-2)
VFNATRFAS

SEQ ID NO: 1400 - protein, 12 aa, Severe Acute Respiratory Syndrome coronavirus 2 (SARS-CoV-2)
VYAWNRKRISNC

SEQ ID NO: 1401 - protein, 12 aa, Severe Acute Respiratory Syndrome coronavirus 2 (SARS-CoV-2)
YSVLYNSASFST

SEQ ID NO: 1402 - protein, 17 aa, Severe Acute Respiratory Syndrome coronavirus 2 (SARS-CoV-2)
YNYLYRLFRKSNLKPFE

SEQ ID NO: 1403 - protein, 12 aa, Severe Acute Respiratory Syndrome coronavirus 2 (SARS-CoV-2)
FNCYFPLQSYGF

SEQ ID NO: 1404 - protein, 11 aa, Severe Acute Respiratory Syndrome coronavirus 2 (SARS-CoV-2)
YGFQPTNGVGY

SEQ ID NO: 1405 - protein, 9 aa, Severe Acute Respiratory Syndrome coronavirus 2 (SARS-CoV-2)
VVLSFELLH

SEQ ID NO: 1406 - protein, 9 aa, Severe Acute Respiratory Syndrome coronavirus 2 (SARS-CoV-2)
FELLHAPAT

SEQ ID NO: 1407 - protein, 9 aa, Severe Acute Respiratory Syndrome coronavirus 2 (SARS-CoV-2)
VNFNFNGLT

SEQ ID NO: 1408 - protein, 9 aa, Severe Acute Respiratory Syndrome coronavirus 2 (SARS-CoV-2)
FNGLTGTGV

SEQ ID NO: 1409 - protein, 9 aa, Severe Acute Respiratory Syndrome coronavirus 2 (SARS-CoV-2)
FTISVTTEI

SEQ ID NO: 1410 - protein, 16 aa, Severe Acute Respiratory Syndrome coronavirus 2 (SARS-CoV-2)
YGSFCTQLNRALTGIA

SEQ ID NO: 1411 - protein, 14 aa, Severe Acute Respiratory Syndrome coronavirus 2 (SARS-CoV-2)
FNFSQILPDPSKPS

SEQ ID NO: 1412 - protein, 9 aa, Severe Acute Respiratory Syndrome coronavirus 2 (SARS-CoV-2)
LLFNKVTLA

SEQ ID NO: 1413 - protein, 12 aa, Severe Acute Respiratory Syndrome coronavirus 2 (SARS-CoV-2)
FNGLTVLPPLLT

SEQ ID NO: 1414 - protein, 9 aa, Severe Acute Respiratory Syndrome coronavirus 2 (SARS-CoV-2)
LTVLPPLLT

SEQ ID NO: 1415 - protein, 10 aa, Severe Acute Respiratory Syndrome coronavirus 2 (SARS-CoV-2)
MIAQYTSALL

SEQ ID NO: 1416 - protein, 11 aa, Severe Acute Respiratory Syndrome coronavirus 2 (SARS-CoV-2)
FAMQMAYRFNG

SEQ ID NO: 1417 - protein, 9 aa, Severe Acute Respiratory Syndrome coronavirus 2 (SARS-CoV-2)
IANQFNSAI

SEQ ID NO: 1418 - protein, 9 aa, Severe Acute Respiratory Syndrome coronavirus 2 (SARS-CoV-2)
FNSAIGKIQ

SEQ ID NO: 1419 - protein, 10 aa, Severe Acute Respiratory Syndrome coronavirus 2 (SARS-CoV-2)
SLSSTASALG

SEQ ID NO: 1420 - protein, 9 aa, Severe Acute Respiratory Syndrome coronavirus 2 (SARS-CoV-2)
VKQLSSNFG

SEQ ID NO: 1421 - protein, 9 aa, Severe Acute Respiratory Syndrome coronavirus 2 (SARS-CoV-2)
LQSLQTYVT

SEQ ID NO: 1422 - protein, 9 aa, Severe Acute Respiratory Syndrome coronavirus 2 (SARS-CoV-2)
IRAAEIRAS

SEQ ID NO: 1423 - protein, 9 aa, Severe Acute Respiratory Syndrome coronavirus 2 (SARS-CoV-2)
IRASANLAA

SEQ ID NO: 1424 - protein, 9 aa, Severe Acute Respiratory Syndrome coronavirus 2 (SARS-CoV-2)
YHLMSFPQS

SEQ ID NO: 1425 - protein, 10 aa, Severe Acute Respiratory Syndrome coronavirus 2 (SARS-CoV-2)
VIGIVNNTVY

SEQ ID NO: 1426 - protein, 10 aa, Severe Acute Respiratory Syndrome coronavirus 2 (SARS-CoV-2)
YFKNHTSPDV

SEQ ID NO: 1427 - protein, 9 aa, Severe Acute Respiratory Syndrome coronavirus 2 (SARS-CoV-2)
INASVVNIQ

SEQ ID NO: 1428 - protein, 9 aa, Severe Acute Respiratory Syndrome coronavirus 2 (SARS-CoV-2)
WLGFIAGLI

SEQ ID NO: 1429 - protein, 10 aa, Severe Acute Respiratory Syndrome coronavirus 2 (SARS-CoV-2)
LQFAYANRNR

SEQ ID NO: 1430 - protein, 9 aa, Severe Acute Respiratory Syndrome coronavirus 2 (SARS-CoV-2)
LRIAGHHLG

SEQ ID NO: 1431 - protein, 11 aa, Severe Acute Respiratory Syndrome coronavirus 2 (SARS-CoV-2)
VYFASTEKSNI

SEQ ID NO: 1432 - protein, 12 aa, Artificial Sequence
  Synthetic
VYAWNRKRISNS

SEQ ID NO: 1433 - protein, 8 aa, Severe Acute Respiratory Syndrome coronavirus 2 (SARS-CoV-2)
VNFNFNGL

SEQ ID NO: 1434 - protein, 11 aa, Severe Acute Respiratory Syndrome coronavirus 2 (SARS-CoV-2)
FAMQMAYRFNG

SEQ ID NO: 1435 - protein, 12 aa, Severe Acute Respiratory Syndrome coronavirus 2 (SARS-CoV-2)
IGYYRRATRRIR

SEQ ID NO: 1436 - protein, 9 aa, Severe Acute Respiratory Syndrome coronavirus 2 (SARS-CoV-2)
IVLQLPQGT

SEQ ID NO: 1437 - protein, 9 aa, Severe Acute Respiratory Syndrome coronavirus 2 (SARS-CoV-2)
LNQLESKMS

SEQ ID NO: 1438 - protein, 11 aa, Severe Acute Respiratory Syndrome coronavirus 2 (SARS-CoV-2)
QVILLNKHIDA

SEQ ID NO: 1439 - protein, 12 aa, Severe Acute Respiratory Syndrome coronavirus 2 (SARS-CoV-2)
KQLQQSMSSADS

SEQ ID NO: 1440 - protein, 9 aa, Severe Acute Respiratory Syndrome coronavirus 2 (SARS-CoV-2)
FMRIFTIGT

SEQ ID NO: 1441 - protein, 10 aa, Severe Acute Respiratory Syndrome coronavirus 2 (SARS-CoV-2)
FVRATATIPI

SEQ ID NO: 1442 - protein, 11 aa, Severe Acute Respiratory Syndrome coronavirus 2 (SARS-CoV-2)
WLIVGVALLAV

SEQ ID NO: 1443 - protein, 10 aa, Severe Acute Respiratory Syndrome coronavirus 2 (SARS-CoV-2)
VFQSASKIIT

SEQ ID NO: 1444 - protein, 11 aa, Severe Acute Respiratory Syndrome coronavirus 2 (SARS-CoV-2)
WQLALSKGVHF

SEQ ID NO: 1445 - protein, 27 aa, Severe Acute Respiratory Syndrome coronavirus 2 (SARS-CoV-2)
VHFVCNLLLLFVTVYSHLLLVAAGLEA

SEQ ID NO: 1446 - protein, 12 aa, Severe Acute Respiratory Syndrome coronavirus 2 (SARS-CoV-2)
FLYLYALVYFLQ

SEQ ID NO: 1447 - protein, 12 aa, Severe Acute Respiratory Syndrome coronavirus 2 (SARS-CoV-2)
VYFLQSINFVRI

SEQ ID NO: 1448 - protein, 12 aa, Severe Acute Respiratory Syndrome coronavirus 2 (SARS-CoV-2)
INFVRIIMRLWL

SEQ ID NO: 1449 - protein, 12 aa, Severe Acute Respiratory Syndrome coronavirus 2 (SARS-CoV-2)
YNSVTSSIVITS

SEQ ID NO: 1450 - protein, 10 aa, Severe Acute Respiratory Syndrome coronavirus 2 (SARS-CoV-2)
YYQLYSTQLS

SEQ ID NO: 1451 - protein, 11 aa, Severe Acute Respiratory Syndrome coronavirus 2 (SARS-CoV-2)
LIIMRTFKVSI

SEQ ID NO: 1452 - protein, 17 aa, Severe Acute Respiratory Syndrome coronavirus 2 (SARS-CoV-2)
LDYIINLIIKNLSKSLT

SEQ ID NO: 1453 - protein, 13 aa, Severe Acute Respiratory Syndrome coronavirus 2 (SARS-CoV-2)
MKIILFLALITLA

SEQ ID NO: 1454 - protein, 13 aa, Severe Acute Respiratory Syndrome coronavirus 2 (SARS-CoV-2)
VKHVYQLRARSVS

SEQ ID NO: 1455 - protein, 9 aa, Severe Acute Respiratory Syndrome coronavirus 2 (SARS-CoV-2)
VQELYSPIF

SEQ ID NO: 1456 - protein, 12 aa, Severe Acute Respiratory Syndrome coronavirus 2 (SARS-CoV-2)
IFLIVAAIVFIT

SEQ ID NO: 1457 - protein, 12 aa, Severe Acute Respiratory Syndrome coronavirus 2 (SARS-CoV-2)
FLVFLGIITTVA

SEQ ID NO: 1458 - protein, 9 aa, Severe Acute Respiratory Syndrome coronavirus 2 (SARS-CoV-2)
FHQECSLQS

SEQ ID NO: 1459 - protein, 13 aa, Severe Acute Respiratory Syndrome coronavirus 2 (SARS-CoV-2)
WYIRVGARKSAPL

SEQ ID NO: 1460 - protein, 9 aa, Severe Acute Respiratory Syndrome coronavirus 2 (SARS-CoV-2)
YINVFAFPF

SEQ ID NO: 1461 - protein, 16 aa, Severe Acute Respiratory Syndrome coronavirus 2 (SARS-CoV-2)
FTIYSLLLCRMNSRNY

SEQ ID NO: 1462 - protein, 9 aa, Severe Acute Respiratory Syndrome coronavirus 2 (SARS-CoV-2)
YELQTPFEI

SEQ ID NO: 1463 - protein, 11 aa, Severe Acute Respiratory Syndrome coronavirus 2 (SARS-CoV-2)
FEIKLAKKFDT

SEQ ID NO: 1464 - protein, 9 aa, Severe Acute Respiratory Syndrome coronavirus 2 (SARS-CoV-2)
FNGECPNFV

SEQ ID NO: 1465 - protein, 14 aa, Severe Acute Respiratory Syndrome coronavirus 2 (SARS-CoV-2)
NFVFPLNSIIKTIQ

SEQ ID NO: 1466 - protein, 9 aa, Severe Acute Respiratory Syndrome coronavirus 2 (SARS-CoV-2)
IRSVYPVAS

SEQ ID NO: 1467 - protein, 9 aa, Severe Acute Respiratory Syndrome coronavirus 2 (SARS-CoV-2)
YHNESGLKT

SEQ ID NO: 1468 - protein, 12 aa, Severe Acute Respiratory Syndrome coronavirus 2 (SARS-CoV-2)
LEILQKEKVNIN

SEQ ID NO: 1469 - protein, 11 aa, Severe Acute Respiratory Syndrome coronavirus 2 (SARS-CoV-2)
FKLNEEIAIIL

SEQ ID NO: 1470 - protein, 13 aa, Severe Acute Respiratory Syndrome coronavirus 2 (SARS-CoV-2)
IAIILASFSASTS

SEQ ID NO: 1471 - protein, 9 aa, Severe Acute Respiratory Syndrome coronavirus 2 (SARS-CoV-2)
FSASTSAFV

SEQ ID NO: 1472 - protein, 16 aa, Severe Acute Respiratory Syndrome coronavirus 2 (SARS-CoV-2)
IGEQKSILSPLYAFAS

SEQ ID NO: 1473 - protein, 9 aa, Severe Acute Respiratory Syndrome coronavirus 2 (SARS-CoV-2)
VRSIFSRTL

SEQ ID NO: 1474 - protein, 13 aa, Severe Acute Respiratory Syndrome coronavirus 2 (SARS-CoV-2)
VRVLQKAAITILD

SEQ ID NO: 1475 - protein, 10 aa, Severe Acute Respiratory Syndrome coronavirus 2 (SARS-CoV-2)
VYEKLKPVLD

SEQ ID NO: 1476 - protein, 12 aa, Severe Acute Respiratory Syndrome coronavirus 2 (SARS-CoV-2)
IVKFISTCACEI

SEQ ID NO: 1477 - protein, 10 aa, Severe Acute Respiratory Syndrome coronavirus 2 (SARS-CoV-2)
FFKLVNKFLA

SEQ ID NO: 1478 - protein, 12 aa, Severe Acute Respiratory Syndrome coronavirus 2 (SARS-CoV-2)
VNKFLALCADSI

SEQ ID NO: 1479 - protein, 15 aa, Severe Acute Respiratory Syndrome coronavirus 2 (SARS-CoV-2)
IIGGAKLKALNLGET

SEQ ID NO: 1480 - protein, 9 aa, Severe Acute Respiratory Syndrome coronavirus 2 (SARS-CoV-2)
YCALAPNMM

SEQ ID NO: 1481 - protein, 12 aa, Severe Acute Respiratory Syndrome coronavirus 2 (SARS-CoV-2)
VIEVQGYKSVNI

SEQ ID NO: 1482 - protein, 10 aa, Severe Acute Respiratory Syndrome coronavirus 2 (SARS-CoV-2)
EVNSFSGYLK

SEQ ID NO: 1483 - protein, 9 aa, Severe Acute Respiratory Syndrome coronavirus 2 (SARS-CoV-2)
LKLTDNVYI

SEQ ID NO: 1484 - protein, 10 aa, Severe Acute Respiratory Syndrome coronavirus 2 (SARS-CoV-2)
VVNAANVYLK

SEQ ID NO: 1485 - protein, 9 aa, Severe Acute Respiratory Syndrome coronavirus 2 (SARS-CoV-2)
LNKATNNAM

SEQ ID NO: 1486 - protein, 12 aa, Severe Acute Respiratory Syndrome coronavirus 2 (SARS-CoV-2)
IQLLKSAYENFN

SEQ ID NO: 1487 - protein, 12 aa, Severe Acute Respiratory Syndrome coronavirus 2 (SARS-CoV-2)
EVLLAPLLSAGI

SEQ ID NO: 1488 - protein, 9 aa, Severe Acute Respiratory Syndrome coronavirus 2 (SARS-CoV-2)
YDKLVSSFL

SEQ ID NO: 1489 - protein, 9 aa, Severe Acute Respiratory Syndrome coronavirus 2 (SARS-CoV-2)
FLEMKSEKQ

SEQ ID NO: 1490 - protein, 10 aa, Severe Acute Respiratory Syndrome coronavirus 2 (SARS-CoV-2)
FLTENLLLYI

SEQ ID NO: 1491 - protein, 15 aa, Severe Acute Respiratory Syndrome coronavirus 2 (SARS-CoV-2)
LLLYIDINGNLHPDS

SEQ ID NO: 1492 - protein, 10 aa, Severe Acute Respiratory Syndrome coronavirus 2 (SARS-CoV-2)
FLKKDAPYIV

SEQ ID NO: 1493 - protein, 10 aa, Severe Acute Respiratory Syndrome coronavirus 2 (SARS-CoV-2)
VLKKCKSAFY

SEQ ID NO: 1494 - protein, 9 aa, Severe Acute Respiratory Syndrome coronavirus 2 (SARS-CoV-2)
FYILPSIIS

SEQ ID NO: 1495 - protein, 12 aa, Severe Acute Respiratory Syndrome coronavirus 2 (SARS-CoV-2)
FYFYTSKTTVAS

SEQ ID NO: 1496 - protein, 12 aa, Severe Acute Respiratory Syndrome coronavirus 2 (SARS-CoV-2)
ARYMRSLKVPAT

SEQ ID NO: 1497 - protein, 13 aa, Severe Acute Respiratory Syndrome coronavirus 2 (SARS-CoV-2)
YNGYLTSSSKTPE

SEQ ID NO: 1498 - protein, 13 aa, Severe Acute Respiratory Syndrome coronavirus 2 (SARS-CoV-2)
FIETISLAGSYKD

SEQ ID NO: 1499 - protein, 14 aa, Severe Acute Respiratory Syndrome coronavirus 2 (SARS-CoV-2)
FDNLKTLLSLREVR

SEQ ID NO: 1500 - protein, 9 aa, Severe Acute Respiratory Syndrome coronavirus 2 (SARS-CoV-2)
LREVRTIKV

SEQ ID NO: 1501 - protein, 12 aa, Severe Acute Respiratory Syndrome coronavirus 2 (SARS-CoV-2)
VTKIKPHNSHEG

SEQ ID NO: 1502 - protein, 12 aa, Severe Acute Respiratory Syndrome coronavirus 2 (SARS-CoV-2)
LGRYMSALNHTK

SEQ ID NO: 1503 - protein, 11 aa, Severe Acute Respiratory Syndrome coronavirus 2 (SARS-CoV-2)
IELKFNPPALQ

SEQ ID NO: 1504 - protein, 9 aa, Severe Acute Respiratory Syndrome coronavirus 2 (SARS-CoV-2)
YYRARAGEA

SEQ ID NO: 1505 - protein, 10 aa, Severe Acute Respiratory Syndrome coronavirus 2 (SARS-CoV-2)
LILAYCNKTV

SEQ ID NO: 1506 - protein, 10 aa, Severe Acute Respiratory Syndrome coronavirus 2 (SARS-CoV-2)
YLFQHANLDS

SEQ ID NO: 1507 - protein, 11 aa, Severe Acute Respiratory Syndrome coronavirus 2 (SARS-CoV-2)
VMYMGTLSYEQ

SEQ ID NO: 1508 - protein, 18 aa, Severe Acute Respiratory Syndrome coronavirus 2 (SARS-CoV-2)
LVQQESPFVMMSAPPAQY

SEQ ID NO: 1509 - protein, 9 aa, Severe Acute Respiratory Syndrome coronavirus 2 (SARS-CoV-2)
YKHITSKET

SEQ ID NO: 1510 - protein, 9 aa, Severe Acute Respiratory Syndrome coronavirus 2 (SARS-CoV-2)
FYKENSYTT

SEQ ID NO: 1511 - protein, 11 aa, Severe Acute Respiratory Syndrome coronavirus 2 (SARS-CoV-2)
YYKKDNSYFTE

SEQ ID NO: 1512 - protein, 15 aa, Severe Acute Respiratory Syndrome coronavirus 2 (SARS-CoV-2)
LNQLTGYKKPASREL

SEQ ID NO: 1513 - protein, 12 aa, Severe Acute Respiratory Syndrome coronavirus 2 (SARS-CoV-2)
YKHYTPSFKKGA

SEQ ID NO: 1514 - protein, 13 aa, Severe Acute Respiratory Syndrome coronavirus 2 (SARS-CoV-2)
IVWHVNNATNKAT

SEQ ID NO: 1515 - protein, 11 aa, Severe Acute Respiratory Syndrome coronavirus 2 (SARS-CoV-2)
IILKPANNSLK

SEQ ID NO: 1516 - protein, 12 aa, Severe Acute Respiratory Syndrome coronavirus 2 (SARS-CoV-2)
LSRVLGLKTLAT

SEQ ID NO: 1517 - protein, 9 aa, Severe Acute Respiratory Syndrome coronavirus 2 (SARS-CoV-2)
LKTLATHGL

SEQ ID NO: 1518 - protein, 13 aa, Severe Acute Respiratory Syndrome coronavirus 2 (SARS-CoV-2)
FLNKVVSTTTNIV

SEQ ID NO: 1519 - protein, 9 aa, Severe Acute Respiratory Syndrome coronavirus 2 (SARS-CoV-2)
LNRVCTNYM

SEQ ID NO: 1520 - protein, 14 aa, Severe Acute Respiratory Syndrome coronavirus 2 (SARS-CoV-2)
YFFTLLLQLCTFTR

SEQ ID NO: 1521 - protein, 9 aa, Severe Acute Respiratory Syndrome coronavirus 2 (SARS-CoV-2)
FTRSTNSRI

SEQ ID NO: 1522 - protein, 9 aa, Severe Acute Respiratory Syndrome coronavirus 2 (SARS-CoV-2)
IKASMPTTI

SEQ ID NO: 1523 - protein, 16 aa, Severe Acute Respiratory Syndrome coronavirus 2 (SARS-CoV-2)
LEASFNYLKSPNFSKL

SEQ ID NO: 1524 - protein, 9 aa, Severe Acute Respiratory Syndrome coronavirus 2 (SARS-CoV-2)
FSKLINIII

SEQ ID NO: 1525 - protein, 14 aa, Severe Acute Respiratory Syndrome coronavirus 2 (SARS-CoV-2)
IIIWFLLLSVCLGS

SEQ ID NO: 1526 - protein, 19 aa, Severe Acute Respiratory Syndrome coronavirus 2 (SARS-CoV-2)
LIYSTAALGVLMSNLGMPS

SEQ ID NO: 1527 - protein, 10 aa, Severe Acute Respiratory Syndrome coronavirus 2 (SARS-CoV-2)
YLNSTNVTIA

SEQ ID NO: 1528 - protein, 8 aa, Severe Acute Respiratory Syndrome coronavirus 2 (SARS-CoV-2)
FKWDLTAF

SEQ ID NO: 1529 - protein, 11 aa, Severe Acute Respiratory Syndrome coronavirus 2 (SARS-CoV-2)
YILFTRFFYVL

SEQ ID NO: 1530 - protein, 12 aa, Severe Acute Respiratory Syndrome coronavirus 2 (SARS-CoV-2)
FFYVLGLAAIMQ

SEQ ID NO: 1531 - protein, 13 aa, Severe Acute Respiratory Syndrome coronavirus 2 (SARS-CoV-2)
MQLFFSYFAVHFI

SEQ ID NO: 1532 - protein, 11 aa, Severe Acute Respiratory Syndrome coronavirus 2 (SARS-CoV-2)
VHFISNSWLMW

SEQ ID NO: 1533 - protein, 17 aa, Severe Acute Respiratory Syndrome coronavirus 2 (SARS-CoV-2)
LMWLIINLVQMAPISAM

SEQ ID NO: 1534 - protein, 18 aa, Severe Acute Respiratory Syndrome coronavirus 2 (SARS-CoV-2)
ISAMVRMYIFFASFYYVW

SEQ ID NO: 1535 - protein, 13 aa, Severe Acute Respiratory Syndrome coronavirus 2 (SARS-CoV-2)
FYYVWKSYVHVVD

SEQ ID NO: 1536 - protein, 9 aa, Severe Acute Respiratory Syndrome coronavirus 2 (SARS-CoV-2)
YKRNRATRV

SEQ ID NO: 1537 - protein, 13 aa, Severe Acute Respiratory Syndrome coronavirus 2 (SARS-CoV-2)
VNGVRRSFYVYAN

SEQ ID NO: 1538 - protein, 9 aa, Severe Acute Respiratory Syndrome coronavirus 2 (SARS-CoV-2)
YVYANGGKG

SEQ ID NO: 1539 - protein, 17 aa, Severe Acute Respiratory Syndrome coronavirus 2 (SARS-CoV-2)
VARDLSLQFKRPINPTD

SEQ ID NO: 1540 - protein, 15 aa, Severe Acute Respiratory Syndrome coronavirus 2 (SARS-CoV-2)
FVNLDNLRANNTKGS

SEQ ID NO: 1541 - protein, 9 aa, Severe Acute Respiratory Syndrome coronavirus 2 (SARS-CoV-2)
LLLDQALVS

SEQ ID NO: 1542 - protein, 16 aa, Severe Acute Respiratory Syndrome coronavirus 2 (SARS-CoV-2)
FDAYVNTFSSTFNVPM

SEQ ID NO: 1543 - protein, 9 aa, Severe Acute Respiratory Syndrome coronavirus 2 (SARS-CoV-2)
FISAARQGF

SEQ ID NO: 1544 - protein, 13 aa, Severe Acute Respiratory Syndrome coronavirus 2 (SARS-CoV-2)
INAQVAKSHNIAL

SEQ ID NO: 1545 - protein, 14 aa, Severe Acute Respiratory Syndrome coronavirus 2 (SARS-CoV-2)
LRKQIRSAAKKNNL

SEQ ID NO: 1546 - protein, 9 aa, Severe Acute Respiratory Syndrome coronavirus 2 (SARS-CoV-2)
FKLTCATTR

SEQ ID NO: 1547 - protein, 12 aa, Severe Acute Respiratory Syndrome coronavirus 2 (SARS-CoV-2)
VVNVVTTKIALK

SEQ ID NO: 1548 - protein, 25 aa, Severe Acute Respiratory Syndrome coronavirus 2 (SARS-CoV-2)
VNNWLKQLIKVTLVFLFVAAIFYLI

SEQ ID NO: 1549 - protein, 11 aa, Severe Acute Respiratory Syndrome coronavirus 2 (SARS-CoV-2)
IFYLITPVHVM

SEQ ID NO: 1550 - protein, 17 aa, Severe Acute Respiratory Syndrome coronavirus 2 (SARS-CoV-2)
FLHFLPRVFSAVGNICY

SEQ ID NO: 1551 - protein, 10 aa, Severe Acute Respiratory Syndrome coronavirus 2 (SARS-CoV-2)
YVLMDGSIIQ

SEQ ID NO: 1552 - protein, 10 aa, Severe Acute Respiratory Syndrome coronavirus 2 (SARS-CoV-2)
IIQFPNTYLE

SEQ ID NO: 1553 - protein, 16 aa, Severe Acute Respiratory Syndrome coronavirus 2 (SARS-CoV-2)
WVLNNDYYRSLPGVFC

SEQ ID NO: 1554 - protein, 16 aa, Severe Acute Respiratory Syndrome coronavirus 2 (SARS-CoV-2)
VNLLTNMFTPLIQPIG

SEQ ID NO: 1555 - protein, 11 aa, Severe Acute Respiratory Syndrome coronavirus 2 (SARS-CoV-2)
YYFMRFRRAFG

SEQ ID NO: 1556 - protein, 9 aa, Severe Acute Respiratory Syndrome coronavirus 2 (SARS-CoV-2)
FRRAFGEYS

SEQ ID NO: 1557 - protein, 15 aa, Severe Acute Respiratory Syndrome coronavirus 2 (SARS-CoV-2)
FNTLLFLMSFTVLCL

SEQ ID NO: 1558 - protein, 21 aa, Severe Acute Respiratory Syndrome coronavirus 2 (SARS-CoV-2)
VYSVIYLYLTFYLTNDVSFLA

SEQ ID NO: 1559 - protein, 13 aa, Severe Acute Respiratory Syndrome coronavirus 2 (SARS-CoV-2)
WMVMFTPLVPFWI

SEQ ID NO: 1560 - protein, 9 aa, Severe Acute Respiratory Syndrome coronavirus 2 (SARS-CoV-2)
FWITIAYII

SEQ ID NO: 1561 - protein, 13 aa, Severe Acute Respiratory Syndrome coronavirus 2 (SARS-CoV-2)
FYWFFSNYLKRRV

SEQ ID NO: 1562 - protein, 16 aa, Severe Acute Respiratory Syndrome coronavirus 2 (SARS-CoV-2)
YLKRRVVFNGVSFSTF

SEQ ID NO: 1563 - protein, 11 aa, Severe Acute Respiratory Syndrome coronavirus 2 (SARS-CoV-2)
FLLNKEMYLKL

SEQ ID NO: 1564 - protein, 12 aa, Severe Acute Respiratory Syndrome coronavirus 2 (SARS-CoV-2)
YLKLRSDVLLPL

SEQ ID NO: 1565 - protein, 18 aa, Severe Acute Respiratory Syndrome coronavirus 2 (SARS-CoV-2)
LTQYNRYLALYNKYKYFS

SEQ ID NO: 1566 - protein, 13 aa, Severe Acute Respiratory Syndrome coronavirus 2 (SARS-CoV-2)
LLIRKSNHNFLVQ

SEQ ID NO: 1567 - protein, 10 aa, Severe Acute Respiratory Syndrome coronavirus 2 (SARS-CoV-2)
FLVQAGNVQL

SEQ ID NO: 1568 - protein, 11 aa, Severe Acute Respiratory Syndrome coronavirus 2 (SARS-CoV-2)
YKFVRIQPGQT

SEQ ID NO: 1569 - protein, 19 aa, Severe Acute Respiratory Syndrome coronavirus 2 (SARS-CoV-2)
YQCAMRPNFTIKGSFLNGS

SEQ ID NO: 1570 - protein, 10 aa, Severe Acute Respiratory Syndrome coronavirus 2 (SARS-CoV-2)
FLNRFTTTLN

SEQ ID NO: 1571 - protein, 21 aa, Severe Acute Respiratory Syndrome coronavirus 2 (SARS-CoV-2)
IKGTHHWLLLTILTSLLVLVQ

SEQ ID NO: 1572 - protein, 13 aa, Severe Acute Respiratory Syndrome coronavirus 2 (SARS-CoV-2)
FFFLYENAFLPFA

SEQ ID NO: 1573 - protein, 15 aa, Severe Acute Respiratory Syndrome coronavirus 2 (SARS-CoV-2)
IIAMSAFAMMFVKHK

SEQ ID NO: 1574 - protein, 9 aa, Severe Acute Respiratory Syndrome coronavirus 2 (SARS-CoV-2)
FVKHKHAFL

SEQ ID NO: 1575 - protein, 14 aa, Severe Acute Respiratory Syndrome coronavirus 2 (SARS-CoV-2)
FLCLFLLPSLATVA

SEQ ID NO: 1576 - protein, 12 aa, Severe Acute Respiratory Syndrome coronavirus 2 (SARS-CoV-2)
YFNMVYMPASWV

SEQ ID NO: 1577 - protein, 11 aa, Severe Acute Respiratory Syndrome coronavirus 2 (SARS-CoV-2)
VMYASAVVLLI

SEQ ID NO: 1578 - protein, 10 aa, Severe Acute Respiratory Syndrome coronavirus 2 (SARS-CoV-2)
LLILMTARTV

SEQ ID NO: 1579 - protein, 16 aa, Severe Acute Respiratory Syndrome coronavirus 2 (SARS-CoV-2)
VWTLMNVLTLVYKVYY

SEQ ID NO: 1580 - protein, 9 aa, Severe Acute Respiratory Syndrome coronavirus 2 (SARS-CoV-2)
YKVYYGNAL

SEQ ID NO: 1581 - protein, 15 aa, Severe Acute Respiratory Syndrome coronavirus 2 (SARS-CoV-2)
WALIISVTSNYSGVV

SEQ ID NO: 1582 - protein, 10 aa, Severe Acute Respiratory Syndrome coronavirus 2 (SARS-CoV-2)
IFFITGNTLQ

SEQ ID NO: 1583 - protein, 20 aa, Severe Acute Respiratory Syndrome coronavirus 2 (SARS-CoV-2)
YFGLFCLLNRYFRLTLGVYD

SEQ ID NO: 1584 - protein, 11 aa, Severe Acute Respiratory Syndrome coronavirus 2 (SARS-CoV-2)
FRYMNSQGLLP

SEQ ID NO: 1585 - protein, 13 aa, Severe Acute Respiratory Syndrome coronavirus 2 (SARS-CoV-2)
FKLNIKLLGVGGK

SEQ ID NO: 1586 - protein, 20 aa, Severe Acute Respiratory Syndrome coronavirus 2 (SARS-CoV-2)
VVLLSVLQQLRVESSSKLWA

SEQ ID NO: 1587 - protein, 19 aa, Severe Acute Respiratory Syndrome coronavirus 2 (SARS-CoV-2)
FEKMVSLLSVLLSMQGAVD

SEQ ID NO: 1588 - protein, 9 aa, Severe Acute Respiratory Syndrome coronavirus 2 (SARS-CoV-2)
FSSLPSYAA

SEQ ID NO: 1589 - protein, 15 aa, Severe Acute Respiratory Syndrome coronavirus 2 (SARS-CoV-2)
VVLKKLKKSLNVAKS

SEQ ID NO: 1590 - protein, 13 aa, Severe Acute Respiratory Syndrome coronavirus 2 (SARS-CoV-2)
MTQMYKQARSEDK

SEQ ID NO: 1591 - protein, 9 aa, Severe Acute Respiratory Syndrome coronavirus 2 (SARS-CoV-2)
FTMLRKLDN

SEQ ID NO: 1592 - protein, 13 aa, Severe Acute Respiratory Syndrome coronavirus 2 (SARS-CoV-2)
LNNIINNARDGCV

SEQ ID NO: 1593 - protein, 11 aa, Severe Acute Respiratory Syndrome coronavirus 2 (SARS-CoV-2)
IIPLTTAAKLM

SEQ ID NO: 1594 - protein, 13 aa, Severe Acute Respiratory Syndrome coronavirus 2 (SARS-CoV-2)
IVTALRANSAVKL

SEQ ID NO: 1595 - protein, 12 aa, Severe Acute Respiratory Syndrome coronavirus 2 (SARS-CoV-2)
GRFVLALLSDLQ

SEQ ID NO: 1596 - protein, 9 aa, Severe Acute Respiratory Syndrome coronavirus 2 (SARS-CoV-2)
YLYFIKGLN

SEQ ID NO: 1597 - protein, 10 aa, Severe Acute Respiratory Syndrome coronavirus 2 (SARS-CoV-2)
FIKGLNNLNR

SEQ ID NO: 1598 - protein, 12 aa, Severe Acute Respiratory Syndrome coronavirus 2 (SARS-CoV-2)
LNNLNRGMVLGS

SEQ ID NO: 1599 - protein, 9 aa, Severe Acute Respiratory Syndrome coronavirus 2 (SARS-CoV-2)
VLGSLAATV

SEQ ID NO: 1600 - protein, 9 aa, Severe Acute Respiratory Syndrome coronavirus 2 (SARS-CoV-2)
VKMLCTHTG

SEQ ID NO: 1601 - protein, 13 aa, Severe Acute Respiratory Syndrome coronavirus 2 (SARS-CoV-2)
YFVVKRHTFSNYQ

SEQ ID NO: 1602 - protein, 11 aa, Severe Acute Respiratory Syndrome coronavirus 2 (SARS-CoV-2)
YNLLKDCPAVA

SEQ ID NO: 1603 - protein, 10 aa, Severe Acute Respiratory Syndrome coronavirus 2 (SARS-CoV-2)
ILRVYANLGE

SEQ ID NO: 1604 - protein, 13 aa, Severe Acute Respiratory Syndrome coronavirus 2 (SARS-CoV-2)
YYSLLMPILTLTR

SEQ ID NO: 1605 - protein, 12 aa, Severe Acute Respiratory Syndrome coronavirus 2 (SARS-CoV-2)
ILTLTRALTAES

SEQ ID NO: 1606 - protein, 9 aa, Severe Acute Respiratory Syndrome coronavirus 2 (SARS-CoV-2)
YHPNCVNCL

SEQ ID NO: 1607 - protein, 17 aa, Severe Acute Respiratory Syndrome coronavirus 2 (SARS-CoV-2)
LHCANFNVLFSTVFPPT

SEQ ID NO: 1608 - protein, 12 aa, Severe Acute Respiratory Syndrome coronavirus 2 (SARS-CoV-2)
DVNLHSSRLSFK

SEQ ID NO: 1609 - protein, 9 aa, Severe Acute Respiratory Syndrome coronavirus 2 (SARS-CoV-2)
FKELLVYAA

SEQ ID NO: 1610 - protein, 9 aa, Severe Acute Respiratory Syndrome coronavirus 2 (SARS-CoV-2)
MHAASGNLL

SEQ ID NO: 1611 - protein, 15 aa, Severe Acute Respiratory Syndrome coronavirus 2 (SARS-CoV-2)
MNLKYAISAKNRART

SEQ ID NO: 1612 - protein, 14 aa, Severe Acute Respiratory Syndrome coronavirus 2 (SARS-CoV-2)
FHQKLLKSIAATRG

SEQ ID NO: 1613 - protein, 14 aa, Severe Acute Respiratory Syndrome coronavirus 2 (SARS-CoV-2)
FYGGWHNMLKTVYS

SEQ ID NO: 1614 - protein, 12 aa, Severe Acute Respiratory Syndrome coronavirus 2 (SARS-CoV-2)
MLRIMASLVLAR

SEQ ID NO: 1615 - protein, 9 aa, Severe Acute Respiratory Syndrome coronavirus 2 (SARS-CoV-2)
LVLARKHTT

SEQ ID NO: 1616 - protein, 10 aa, Severe Acute Respiratory Syndrome coronavirus 2 (SARS-CoV-2)
FYRLANECAQ

SEQ ID NO: 1617 - protein, 13 aa, Severe Acute Respiratory Syndrome coronavirus 2 (SARS-CoV-2)
ICQAVTANVNALL

SEQ ID NO: 1618 - protein, 15 aa, Severe Acute Respiratory Syndrome coronavirus 2 (SARS-CoV-2)
TANVNALLSTDGNKI

SEQ ID NO: 1619 - protein, 10 aa, Severe Acute Respiratory Syndrome coronavirus 2 (SARS-CoV-2)
YVRNLQHRLY

SEQ ID NO: 1620 - protein, 17 aa, Severe Acute Respiratory Syndrome coronavirus 2 (SARS-CoV-2)
FVNEFYAYLRKHFSMMI

SEQ ID NO: 1621 - protein, 12 aa, Severe Acute Respiratory Syndrome coronavirus 2 (SARS-CoV-2)
VVCFNSTYASQG

SEQ ID NO: 1622 - protein, 17 aa, Severe Acute Respiratory Syndrome coronavirus 2 (SARS-CoV-2)
IKNFKSVLYYQNNVFMS

SEQ ID NO: 1623 - protein, 9 aa, Severe Acute Respiratory Syndrome coronavirus 2 (SARS-CoV-2)
FCSQHTMLV

SEQ ID NO: 1624 - protein, 9 aa, Severe Acute Respiratory Syndrome coronavirus 2 (SARS-CoV-2)
IERFVSLAI

SEQ ID NO: 1625 - protein, 16 aa, Severe Acute Respiratory Syndrome coronavirus 2 (SARS-CoV-2)
FHLYLQYIRKLHDELT

SEQ ID NO: 1626 - protein, 17 aa, Severe Acute Respiratory Syndrome coronavirus 2 (SARS-CoV-2)
MLDMYSVMLTNDNTSRY

SEQ ID NO: 1627 - protein, 11 aa, Severe Acute Respiratory Syndrome coronavirus 2 (SARS-CoV-2)
HVISTSHKLVL

SEQ ID NO: 1628 - protein, 10 aa, Severe Acute Respiratory Syndrome coronavirus 2 (SARS-CoV-2)
LVLSVNPYVC

SEQ ID NO: 1629 - protein, 13 aa, Severe Acute Respiratory Syndrome coronavirus 2 (SARS-CoV-2)
VFGLYKNTCVGSD

SEQ ID NO: 1630 - protein, 11 aa, Severe Acute Respiratory Syndrome coronavirus 2 (SARS-CoV-2)
LKLFAAETLKA

SEQ ID NO: 1631 - protein, 13 aa, Severe Acute Respiratory Syndrome coronavirus 2 (SARS-CoV-2)
FKLSYGIATVREV

SEQ ID NO: 1632 - protein, 11 aa, Severe Acute Respiratory Syndrome coronavirus 2 (SARS-CoV-2)
YRVTKNSKVQI

SEQ ID NO: 1633 - protein, 10 aa, Severe Acute Respiratory Syndrome coronavirus 2 (SARS-CoV-2)
YRGTTTYKLN

SEQ ID NO: 1634 - protein, 10 aa, Severe Acute Respiratory Syndrome coronavirus 2 (SARS-CoV-2)
YFVLTSHTVM

SEQ ID NO: 1635 - protein, 9 aa, Severe Acute Respiratory Syndrome coronavirus 2 (SARS-CoV-2)
VMPLSAPTL

SEQ ID NO: 1636 - protein, 12 aa, Severe Acute Respiratory Syndrome coronavirus 2 (SARS-CoV-2)
YVRITGLYPTLN

SEQ ID NO: 1637 - protein, 9 aa, Severe Acute Respiratory Syndrome coronavirus 2 (SARS-CoV-2)
FSSNVANYQ

SEQ ID NO: 1638 - protein, 12 aa, Severe Acute Respiratory Syndrome coronavirus 2 (SARS-CoV-2)
MQKYSTLQGPPG

SEQ ID NO: 1639 - protein, 9 aa, Severe Acute Respiratory Syndrome coronavirus 2 (SARS-CoV-2)
FDKFKVNST

SEQ ID NO: 1640 - protein, 9 aa, Severe Acute Respiratory Syndrome coronavirus 2 (SARS-CoV-2)
FKVNSTLEQ

SEQ ID NO: 1641 - protein, 17 aa, Severe Acute Respiratory Syndrome coronavirus 2 (SARS-CoV-2)
YDLSVVNARLRAKHYVY

SEQ ID NO: 1642 - protein, 10 aa, Severe Acute Respiratory Syndrome coronavirus 2 (SARS-CoV-2)
YFNSVCRLMK

SEQ ID NO: 1643 - protein, 21 aa, Severe Acute Respiratory Syndrome coronavirus 2 (SARS-CoV-2)
FKMFYKGVITHDVSSAINRPQ

SEQ ID NO: 1644 - protein, 16 aa, Severe Acute Respiratory Syndrome coronavirus 2 (SARS-CoV-2)
VFISPYNSQNAVASKI

SEQ ID NO: 1645 - protein, 16 aa, Severe Acute Respiratory Syndrome coronavirus 2 (SARS-CoV-2)
VNRFNVAITRAKVGIL

SEQ ID NO: 1646 - protein, 12 aa, Severe Acute Respiratory Syndrome coronavirus 2 (SARS-CoV-2)
YRRLISMMGFKM

SEQ ID NO: 1647 - protein, 19 aa, Severe Acute Respiratory Syndrome coronavirus 2 (SARS-CoV-2)
LQLGFSTGVNLVAVPTGYV

SEQ ID NO: 1648 - protein, 17 aa, Severe Acute Respiratory Syndrome coronavirus 2 (SARS-CoV-2)
FKHLIPLMYKGLPWNVV

SEQ ID NO: 1649 - protein, 16 aa, Severe Acute Respiratory Syndrome coronavirus 2 (SARS-CoV-2)
WNVVRIKIVQMLSDTL

SEQ ID NO: 1650 - protein, 17 aa, Severe Acute Respiratory Syndrome coronavirus 2 (SARS-CoV-2)
INAACRKVQHMVVKAAL

SEQ ID NO: 1651 - protein, 10 aa, Severe Acute Respiratory Syndrome coronavirus 2 (SARS-CoV-2)
RVLSNLNLPG

SEQ ID NO: 1652 - protein, 10 aa, Severe Acute Respiratory Syndrome coronavirus 2 (SARS-CoV-2)
LYVNKHAFHT

SEQ ID NO: 1653 - protein, 10 aa, Severe Acute Respiratory Syndrome coronavirus 2 (SARS-CoV-2)
FVNLKQLPFF

SEQ ID NO: 1654 - protein, 12 aa, Severe Acute Respiratory Syndrome coronavirus 2 (SARS-CoV-2)
YVPLKSATCITR

SEQ ID NO: 1655 - protein, 13 aa, Severe Acute Respiratory Syndrome coronavirus 2 (SARS-CoV-2)
YNMMISAGFSLWV

SEQ ID NO: 1656 - protein, 11 aa, Severe Acute Respiratory Syndrome coronavirus 2 (SARS-CoV-2)
VAFNVVNKGHF

SEQ ID NO: 1657 - protein, 12 aa, Severe Acute Respiratory Syndrome coronavirus 2 (SARS-CoV-2)
EVKILNNLGVDI

SEQ ID NO: 1658 - protein, 9 aa, Severe Acute Respiratory Syndrome coronavirus 2 (SARS-CoV-2)
YKRDAPAHI

SEQ ID NO: 1659 - protein, 10 aa, Severe Acute Respiratory Syndrome coronavirus 2 (SARS-CoV-2)
LFRNARNGVL

SEQ ID NO: 1660 - protein, 12 aa, Severe Acute Respiratory Syndrome coronavirus 2 (SARS-CoV-2)
VKGLQPSVGPKQ

SEQ ID NO: 1661 - protein, 16 aa, Severe Acute Respiratory Syndrome coronavirus 2 (SARS-CoV-2)
YFTQSRNLQEFKPRSQ

SEQ ID NO: 1662 - protein, 21 aa, Severe Acute Respiratory Syndrome coronavirus 2 (SARS-CoV-2)
FSHSQLGGLHLLIGLAKRFKE

SEQ ID NO: 1663 - protein, 11 aa, Severe Acute Respiratory Syndrome coronavirus 2 (SARS-CoV-2)
VEIIKSQDLSV

SEQ ID NO: 1664 - protein, 10 aa, Severe Acute Respiratory Syndrome coronavirus 2 (SARS-CoV-2)
LYKMQRMLLE

SEQ ID NO: 1665 - protein, 9 aa, Severe Acute Respiratory Syndrome coronavirus 2 (SARS-CoV-2)
YTQLCQYLN

SEQ ID NO: 1666 - protein, 9 aa, Severe Acute Respiratory Syndrome coronavirus 2 (SARS-CoV-2)
LTLAVPYNM

SEQ ID NO: 1667 - protein, 10 aa, Severe Acute Respiratory Syndrome coronavirus 2 (SARS-CoV-2)
VLRQWLPTGT

SEQ ID NO: 1668 - protein, 9 aa, Severe Acute Respiratory Syndrome coronavirus 2 (SARS-CoV-2)
FTYICGFIQ

SEQ ID NO: 1669 - protein, 12 aa, Severe Acute Respiratory Syndrome coronavirus 2 (SARS-CoV-2)
FIQQKLALGGSV

SEQ ID NO: 1670 - protein, 9 aa, Severe Acute Respiratory Syndrome coronavirus 2 (SARS-CoV-2)
YKLMGHFAW

SEQ ID NO: 1671 - protein, 10 aa, Severe Acute Respiratory Syndrome coronavirus 2 (SARS-CoV-2)
WWTAFVTNVN

SEQ ID NO: 1672 - protein, 13 aa, Severe Acute Respiratory Syndrome coronavirus 2 (SARS-CoV-2)
FVTNVNASSSEAF

SEQ ID NO: 1673 - protein, 9 aa, Severe Acute Respiratory Syndrome coronavirus 2 (SARS-CoV-2)
FLIGCNYLG

SEQ ID NO: 1674 - protein, 11 aa, Severe Acute Respiratory Syndrome coronavirus 2 (SARS-CoV-2)
IFWRNTNPIQL

SEQ ID NO: 1675 - protein, 13 aa, Severe Acute Respiratory Syndrome coronavirus 2 (SARS-CoV-2)
MILSLLSKGRLII

SEQ ID NO: 1676 - protein, 11 aa, Severe Acute Respiratory Syndrome coronavirus 2 (SARS-CoV-2)
LIIRENNRVVI

SEQ ID NO: 1677 - protein, 650 aa, Artificial Sequence
  Synthetic
TQSLLIVNNATNVVIKVFLGVYYHKNNKSWMESEFRVYSSANNCTFEYVPKEITVATSRTLSYYGSGSGRGHLRIAGHHLGRCDNKCVNFNFNGLTGTGVLTELLQYGSFCTQLNRALTGIAVEQLSYFIASFRLFARTRSMWSFNPETNILLNVGGNYNYLYRLFRKSNLKPFERDILKKLLEQWNLVIGFLFLTWGSGSGFGGFNFSQILPDPSKPSKRSVLSFELLHAPATVCGQTLLALHRSYLTPGDSSICLLQFAYANRNRFLYIVEGFNCYFPLQSYGFQPTNGVGYQPYDVVIGIVNNTVYDPLQIPFAMQMAYRFNGIGVTGRLQSLQTYVTQQLTDEMIAQYTSALLANDGVYFASTEKSNIIRPPAYTNSFTRGVYYLDKYFKNHTSPDVDLPTNFTISVTTEILPVGSGSGTSNFRVQPTESIVRFDGYFKIYSKHTPINLQDLFLPFFSNVTWFHAIHVSGTNGTSRVKNLNSSRVPDPRTFLLKYNENGTITDAISGINASVVNIQKEIFGEVFNATRFASVYAWNRKRISNCVADYSVLYNSASFSTFKGKGYHLMSFPQSAPHQKLIANQFNSAIGKIQDSLGSGSGIGNYKLNTDHSSSSDNIMYSFVSEETGTLIVNLACFVLAAVYRINWI

SEQ ID NO: 1678 - protein, 655 aa, Artificial Sequence
  Synthetic
FGGFNFSQILPDPSKPSKRSGGNYNYLYRLFRKSNLKPFERDIFLGVYYHKNNKSWMESEFRVYSSANNCTFEYVPRTFLLKYNENGTITDASRVKNLNSSRVPDTQSLLIVNNATNVVIKVGSGSGGKGYHLMSFPQSAPHISGINASVVNIQKEIGSGSGLKKLLEQWNLVIGFLFLTWQIPFAMQMAYRFNGIGVTGRLQSLQTYVTQQLGSGSGIGNYKLNTDHSSSSDNIRGHLRIAGHHLGRCDVLSFELLHAPATVCGLLQYGSFCTQLNRALTGIAVEQLSYFIASFRLFARTRSMWSFNPETNILLNVNDGVYFASTEKSNIIRGSGSGQKLIANQFNSAIGKIQDSLMYSFVSEETGTLIVNFGEVFNATRFASVYAWNRKRISNCVADYSVLYNSASFSTFKQTLLALHRSYLTPGDSSPPAYTNSFTRGVYYVEGFNCYFPLQSYGFQPTNGVGYQPYDVVIGIVNNTVYDPLGSGSGLACFVLAAVYRINWIPKEITVATSRTLSYYPTNFTISVTTEILPVNKCVNFNFNGLTGTGVLTEDGYFKIYSKHTPINLQDLFLPFFSNVTWFHAIHVSGTNGTTSNFRVQPTESIVRFTDEMIAQYTSALLALDKYFKNHTSPDVDLICLLQFAYANRNRFLYI

SEQ ID NO: 1679 - protein, 635 aa, Artificial Sequence
  Synthetic
GKGYHLMSFPQSAPHQTLLALHRSYLTPGDSSVLSFELLHAPATVCGQKLIANQFNSAIGKIQDSLLKKLLEQWNLVIGFLFLTWQIPFAMQMAYRFNGIGVPKEITVATSRTLSYYPTNFTISVTTEILPVICLLQFAYANRNRFLYINDGVYFASTEKSNIIRTDEMIAQYTSALLANKCVNFNFNGLTGTGVLTEDGYFKIYSKHTPINLQDLFLPFFSNVTWFHAIHVSGTNGTTGRLQSLQTYVTQQLGSGSGLACFVLAAVYRINWIVEGFNCYFPLQSYGFQPTNGVGYQPYFLGVYYHKNNKSWMESEFRVYSSANNCTFEYVLDKYFKNHTSPDVDLPPAYTNSFTRGVYYPRTFLLKYNENGTITDASRVKNLNSSRVPDTQSLLIVNNATNVVIKVGGNYNYLYRLFRKSNLKPFERDIMYSFVSEETGTLIVNFGGFNFSQILPDPSKPSKRSLLQYGSFCTQLNRALTGIAVEQISGINASVVNIQKEIDVVIGIVNNTVYDPLRGHLRIAGHHLGRCDTSNFRVQPTESIVRFFGEVFNATRFASVYAWNRKRISNCVADYSVLYNSASFSTFKIGNYKLNTDHSSSSDNILSYFIASFRLFARTRSMWSFNPETNILLNV

SEQ ID NO: 1680 - protein, 795 aa, Artificial Sequence
  Synthetic
TSNFRVQPTESIVRFGSGSGDVVIGIVNNTVYDPLGSGSGISGINASVVNIQKEIGSGSGNDGVYFASTEKSNIIRGSGSGGKGYHLMSFPQSAPHGSGSGRGHLRIAGHHLGRCDGSGSGQDLFLPFFSNVTWFHAIHVSGTNGTGSGSGLACFVLAAVYRINWIGSGSGVEGFNCYFPLQSYGFQPTNGVGYQPYGSGSGNKCVNFNFNGLTGTGVLTEGSGSGFGGFNFSQILPDPSKPSKRSGSGSGTDEMIAQYTSALLAGSGSGGGNYNYLYRLFRKSNLKPFERDIGSGSGQTLLALHRSYLTPGDSSGSGSGFLGVYYHKNNKSWMESEFRVYSSANNCTFEYVGSGSGQKLIANQFNSAIGKIQDSLGSGSGPRTFLLKYNENGTITDAGSGSGVLSFELLHAPATVCGGSGSGTQSLLIVNNATNVVIKVGSGSGIGNYKLNTDHSSSSDNIGSGSGSRVKNLNSSRVPDGSGSGLLQYGSFCTQLNRALTGIAVEQGSGSGMYSFVSEETGTLIVNGSGSGPKEITVATSRTLSYYGSGSGICLLQFAYANRNRFLYIGSGSGLKKLLEQWNLVIGFLFLTWGSGSGFGEVFNATRFASVYAWNRKRISNCVADYSVLYNSASFSTFKGSGSGLDKYFKNHTSPDVDLGSGSGQIPFAMQMAYRFNGIGVGSGSGPPAYTNSFTRGVYYGSGSGDGYFKIYSKHTPINLGSGSGPTNFTISVTTEILPVGSGSGTGRLQSLQTYVTQQLGSGSGLSYFIASFRLFARTRSMWSFNPETNILLNV

SEQ ID NO: 1681 - protein, 894 aa, Artificial Sequence
  Synthetic
RGHLRIAGHHLGRCDGSGSGSGSLKKLLEQWNLVIGFLFLTWGSGSGSGSTQSLLIVNNATNVVIKVGSGSGSGSDVVIGIVNNTVYDPLGSGSGSGSIGNYKLNTDHSSSSDNIGSGSGSGSTGRLQSLQTYVTQQLGSGSGSGSDGYFKIYSKHTPINLGSGSGSGSPTNFTISVTTEILPVGSGSGSGSQIPFAMQMAYRFNGIGVGSGSGSGSSRVKNLNSSRVPDGSGSGSGSTSNFRVQPTESIVRFGSGSGSGSISGINASVVNIQKEIGSGSGSGSTDEMIAQYTSALLAGSGSGSGSFGGFNFSQILPDPSKPSKRSGSGSGSGSLACFVLAAVYRINWIGSGSGSGSQDLFLPFFSNVTWFHAIHVSGTNGTGSGSGSGSNDGVYFASTEKSNIIRGSGSGSGSNKCVNFNFNGLTGTGVLTEGSGSGSGSGGNYNYLYRLFRKSNLKPFERDIGSGSGSGSPPAYTNSFTRGVYYGSGSGSGSQTLLALHRSYLTPGDSSGSGSGSGSVLSFELLHAPATVCGGSGSGSGSFLGVYYHKNNKSWMESEFRVYSSANNCTFEYVGSGSGSGSQKLIANQFNSAIGKIQDSLGSGSGSGSLLQYGSFCTQLNRALTGIAVEQGSGSGSGSPRTFLLKYNENGTITDAGSGSGSGSVEGFNCYFPLQSYGFQPTNGVGYQPYGSGSGSGSGKGYHLMSFPQSAPHGSGSGSGSLSYFIASFRLFARTRSMWSFNPETNILLNVGSGSGSGSLDKYFKNHTSPDVDLGSGSGSGSMYSFVSEETGTLIVNGSGSGSGSFGEVFNATRFASVYAWNRKRISNCVADYSVLYNSASFSTFKGSGSGSGSPKEITVATSRTLSYYGSGSGSGSICLLQFAYANRNRFLYI

SEQ ID NO: 1682 - protein, 84 aa, Artificial Sequence
  Synthetic
FLGVYYHKNNKSWMESEGSGSGTSNFRVQPTESIVRFLDKYFKNHTSPDVDLNKCVNFNFNGLTGTVEGFNCYFPLQSYGFQPT

SEQ ID NO: 1683 - protein, 84 aa, Artificial Sequence
  Synthetic
ESEFRVYSSANNCTFEYVPPAYTNSFTRGVYYTGRLQSLQTYVTQQLFGGFNFSQILPDPSKPSKRSLQSYGFQPTNGVGYQPY

SEQ ID NO: 1684 - protein, 92 aa, Artificial Sequence
  Synthetic
PRTFLLKYNENGTITDAQTLLALHRSYLTPGDSSGGNYNYLYRLFRKSNLKPFERDIFLGVYYHKNNKSWMESEESEFRVYSSANNCTFEYV

SEQ ID NO: 1685 - protein, 68 aa, Artificial Sequence
  Synthetic
LSHFVNLDNLRANNTKGSLPIANYIFWRNTNPIQLSSYGPGPGDVDTDFVNEFYAYLRKHFSMMILSD

SEQ ID NO: 1686 - protein, 80 aa, Artificial Sequence
  Synthetic
LGSLIYSTAALGVLMSNLGMPSYGPGPGDQAISMWALIISVTSNYSGVVTTVGPGPGVASIKNFKSVLYYQNNVFMSEAK

SEQ ID NO: 1687 - protein, 60 aa, Artificial Sequence
  Synthetic
WPLIVTALRANSAVKLQKVGGNYNYLYRLFRKSNLKPFERDIMPNMLRIMASLVLARKHT

SEQ ID NO: 1688 - protein, 73 aa, Artificial Sequence
  Synthetic
LLPLTQYNRYLALYNKYKYFSGAMDGPGPGDMTYRRLISMMGFKMNYQVGPGPGYEDLLIRKSNHNFLVQAGN

SEQ ID NO: 1689 - protein, 80 aa, Artificial Sequence
  Synthetic
GDQFKHLIPLMYKGLPWNVVRIKGPGPGIPTITQMNLKYAISAKNRARTVAGGPGPGNSWLMWLIINLVQMAPISAMVRM

SEQ ID NO: 1690 - protein, 60 aa, Artificial Sequence
  Synthetic
TAFVTNVNASSSEAFGPGPGLYFIKGLNNLNRGGPGPGRKAVFISPYNSQNAVASKILGL

SEQ ID NO: 1691 - protein, 60 aa, Artificial Sequence
  Synthetic
VDAVNLLTNMFTPLIQPIGALDKGRLIIRENNRVVISSGPGPGTERLKLFAAETLKATEE

SEQ ID NO: 1692 - protein, 60 aa, Artificial Sequence
  Synthetic
SSNVNRFNVAITRAKVGILSIMGPGPGGSLYVNKHAFHTPAFDTQSLLIVNNATNVVIKV

SEQ ID NO: 1693 - protein, 419 aa, Severe Acute Respiratory Syndrome coronavirus 2 (SARS-CoV-2)
MSDNGPQNQRNAPRITFGGPSDSTGSNQNGERSGARSKQRRPQGLPNNTASWFTALTQHGKEDLKFPRGQGVPINTNSSPDDQIGYYRRATRRIRGGDGKMKDLSPRWYFYYLGTGPEAGLPYGANKDGIIWVATEGALNTPKDHIGTRNPANNAAIVLQLPQGTTLPKGFYAEGSRGGSQASSRSSSRSRNSSRNSTPGSSRGTSPARMAGNGGDAALALLLLDRLNQLESKMSGKGQQQQGQTVTKKSAAEASKKPRQKRTATKAYNVTQAFGRRGPEQTQGNFGDQELIRQGTDYKHWPQIAQFAPSASAFFGMSRIGMEVTPSGTWLTYTGAIKLDDKDPNFKDQVILLNKHIDAYKTFPPTEPKKDKKKKADETQALPQRQKKQQTVTLLPAADLDDFSKQLQQSMSSADSTQA

SEQ ID NO: 1694 - protein, 275 aa, Severe Acute Respiratory Syndrome coronavirus 2 (SARS-CoV-2)
MDLFMRIFTIGTVTLKQGEIKDATPSDFVRATATIPIQASLPFGWLIVGVALLAVFQSASKIITLKKRWQLALSKGVHFVCNLLLLFVTVYSHLLLVAAGLEAPFLYLYALVYFLQSINFVRIIMRLWLCWKCRSKNPLLYDANYFLCWHTNCYDYCIPYNSVTSSIVITSGDGTTSPISEHDYQIGGYTEKWESGVKDCVVLHSYFTSDYYQLYSTQLSTDTGVEHVTFFIYNKIVDEPEEHVQIHTIDGSSGVVNPVMEPIYDEPTTTTSVPL

SEQ ID NO: 1695 - protein, 61 aa, Severe Acute Respiratory Syndrome coronavirus 2 (SARS-CoV-2)
MFHLVDFQVTIAEILLIIMRTFKVSIWNLDYIINLIIKNLSKSLTENKYSQLDEEQPMEID

SEQ ID NO: 1696 - protein, 121 aa, Severe Acute Respiratory Syndrome coronavirus 2 (SARS-CoV-2)
MKIILFLALITLATCELYHYQECVRGTTVLLKEPCSSGTYEGNSPFHPLADNKFALTCFSTQFAFACPDGVKHVYQLRARSVSPKLFIRQEEVQELYSPIFLIVAAIVFITLCFTLKRKTE

SEQ ID NO: 1697 - protein, 121 aa, Severe Acute Respiratory Syndrome coronavirus 2 (SARS-CoV-2)
MKFLVFLGIITTVAAFHQECSLQSCTQHQPYVVDDPCPIHFYSKWYIRVGARKSAPLIELCVDEAGSKSPIQYIDIGNYTVSCLPFTINCQEPKLGSLVVRCSFYEDFLEYHDVRVVLDFI

SEQ ID NO: 1698 - protein, 38 aa, Severe Acute Respiratory Syndrome coronavirus 2 (SARS-CoV-2)
MGYINVFAFPFTIYSLLLCRMNSRNYIAQVDVVNFNLT

SEQ ID NO: 1699 - protein, 638 aa, Severe Acute Respiratory Syndrome coronavirus 2 (SARS-CoV-2)
AYTRYVDNNFCGPDGYPLECIKDLLARAGKASCTLSEQLDFIDTKRGVYCCREHEHEIAWYTERSEKSYELQTPFEIKLAKKFDTFNGECPNFVFPLNSIIKTIQPRVEKKKLDGFMGRIRSVYPVASPNECNQMCLSTLMKCDHCGETSWQTGDFVKATCEFCGTENLTKEGATTCGYLPQNAVVKIYCPACHNSEVGPEHSLAEYHNESGLKTILRKGGRTIAFGGCVFSYVGCHNKCAYWVPRASANIGCNHTGVVGEGSEGLNDNLLEILQKEKVNINIVGDFKLNEEIAIILASFSASTSAFVETVKGLDYKAFKQIVESCGNFKVTKGKAKKGAWNIGEQKSILSPLYAFASEAARVVRSIFSRTLETAQNSVRVLQKAAITILDGISQYSLRLIDAMMFTSDLATNNLVVMAYITGGVVQLTSQWLTNIFGTVYEKLKPVLDWLEEKFKEGVEFLRDGWEIVKFISTCACEIVGGQIVTCAKEIKESVQTFFKLVNKFLALCADSIIIGGAKLKALNLGETFVTHSKGLYRKCVKSREETGLLMPLKAPKEIIFLEGETLPTEVLTEEVVLKTGDLQPLEQPTSEAVEAPLVGTPVCINGLMLLEIKDTEKYCALAPNMMVTNNTFTLKGG

SEQ ID NO: 1700 - protein, 1945 aa, Severe Acute Respiratory Syndrome coronavirus 2 (SARS-CoV-2)
APTKVTFGDDTVIEVQGYKSVNITFELDERIDKVLNEKCSAYTVELGTEVNEFACVVADAVIKTLQPVSELLTPLGIDLDEWSMATYYLFDESGEFKLASHMYCSFYPPDEDEEEGDCEEEEFEPSTQYEYGTEDDYQGKPLEFGATSAALQPEEEQEEDWLDDDSQQTVGQQDGSEDNQTTTIQTIVEVQPQLEMELTPVVQTIEVNSFSGYLKLTDNVYIKNADIVEEAKKVKPTVVVNAANVYLKHGGGVAGALNKATNNAMQVESDDYIATNGPLKVGGSCVLSGHNLAKHCLHVVGPNVNKGEDIQLLKSAYENFNQHEVLLAPLLSAGIFGADPIHSLRVCVDTVRTNVYLAVFDKNLYDKLVSSFLEMKSEKQVEQKIAEIPKEEVKPFITESKPSVEQRKQDDKKIKACVEEVTTTLEETKFLTENLLLYIDINGNLHPDSATLVSDIDITFLKKDAPYIVGDVVQEGVLTAVVIPTKKAGGTTEMLAKALRKVPTDNYITTYPGQGLNGYTVEEAKTVLKKCKSAFYILPSIISNEKQEILGTVSWNLREMLAHAEETRKLMPVCVETKAIVSTIQRKYKGIKIQEGVVDYGARFYFYTSKTTVASLINTLNDLNETLVTMPLGYVTHGLNLEEAARYMRSLKVPATVSVSSPDAVTAYNGYLTSSSKTPEEHFIETISLAGSYKDWSYSGQSTQLGIEFLKRGDKSVYYTSNPTTFHLDGEVITFDNLKTLLSLREVRTIKVFTTVDNINLHTQVVDMSMTYGQQFGPTYLDGADVTKIKPHNSHEGKTFYVLPNDDTLRVEAFEYYHTTDPSFLGRYMSALNHTKKWKYPQVNGLTSIKWADNNCYLATALLTLQQIELKFNPPALQDAYYRARAGEAANFCALILAYCNKTVGELGDVRETMSYLFQHANLDSCKRVLNVVCKTCGQQQTTLKGVEAVMYMGTLSYEQFKKGVQIPCTCGKQATKYLVQQESPFVMMSAPPAQYELKHGTFTCASEYTGNYQCGHYKHITSKETLYCIDGALLTKSSEYKGPITDVFYKENSYTTTIKPVTYKLDGVVCTEIDPKLDNYYKKDNSYFTEQPIDLVPNQPYPNASFDNFKFVCDNIKFADDLNQLTGYKKPASRELKVTFFPDLNGDVVAIDYKHYTPSFKKGAKLLHKPIVWHVNNATNKATYKPNTWCIRCLWSTKPVETSNSFDVLKSEDAQGMDNLACEDLKPVSEEVVENPTIQKDVLECNVKTTEVVGDIILKPANNSLKITEEVGHTDLMAAYVDNSSLTIKKPNELSRVLGLKTLATHGLAAVNSVPWDTIANYAKPFLNKVVSTTTNIVTRCLNRVCTNYMPYFFTLLLQLCTFTRSTNSRIKASMPTTIAKNTVKSVGKFCLEASFNYLKSPNFSKLINIIIWFLLLSVCLGSLIYSTAALGVLMSNLGMPSYCTGYREGYLNSTNVTIATYCTGSIPCSVCLSGLDSLDTYPSLETIQITISSFKWDLTAFGLVAEWFLAYILFTRFFYVLGLAAIMQLFFSYFAVHFISNSWLMWLIINLVQMAPISAMVRMYIFFASFYYVWKSYVHVVDGCNSSTCMMCYKRNRATRVECTTIVNGVRRSFYVYANGGKGFCKLHNWNCVNCDTFCAGSTFISDEVARDLSLQFKRPINPTDQSSYIVDSVTVKNGSIHLYFDKAGQKTYERHSLSHFVNLDNLRANNTKGSLPINVIVFDGKSKCEESSAKSASVYYSQLMCQPILLLDQALVSDVGDSAEVAVKMFDAYVNTFSSTFNVPMEKLKTLVATAEAELAKNVSLDNVLSTFISAARQGFVDSDVETKDVVECLKLSHQSDIEVTGDSCNNYMLTYNKVENMTPRDLGACIDCSARHINAQVAKSHNIALIWNVKDFMSLSEQLRKQIRSAAKKNNLPFKLTCATTRQVVNVVTTKIALKGG

SEQ ID NO: 1701 - protein, 500 aa, Severe Acute Respiratory Syndrome coronavirus 2 (SARS-CoV-2)
KIVNNWLKQLIKVTLVFLFVAAIFYLITPVHVMSKHTDFSSEIIGYKAIDGGVTRDIASTDTCFANKHADFDTWFSQRGGSYTNDKACPLIAAVITREVGFVVPGLPGTILRTTNGDFLHFLPRVFSAVGNICYTPSKLIEYTDFATSACVLAAECTIFKDASGKPVPYCYDTNVLEGSVAYESLRPDTRYVLMDGSIIQFPNTYLEGSVRVVTTFDSEYCRHGTCERSEAGVCVSTSGRWVLNNDYYRSLPGVFCGVDAVNLLTNMFTPLIQPIGALDISASIVAGGIVAIVVTCLAYYFMRFRRAFGEYSHVVAFNTLLFLMSFTVLCLTPVYSFLPGVYSVIYLYLTFYLTNDVSFLAHIQWMVMFTPLVPFWITIAYIICISTKHFYWFFSNYLKRRVVFNGVSFSTFEEAALCTFLLNKEMYLKLRSDVLLPLTQYNRYLALYNKYKYFSGAMDTTSYREAACCHLAKALNDFSNSGSDVLYQPPQTSITSAVLQ

SEQ ID NO: 1702 - protein, 306 aa, Severe Acute Respiratory Syndrome coronavirus 2 (SARS-CoV-2) [sequence omitted]

SEQ ID NO: 1703 - protein, 290 aa, Severe Acute Respiratory Syndrome coronavirus 2 (SARS-CoV-2)
SAVKRTIKGTHHWLLLTILTSLLVLVQSTQWSLFFFLYENAFLPFAMGIIAMSAFAMMFVKHKHAFLCLFLLPSLATVAYFNMVYMPASWVMRIMTWLDMVDTSLSGFKLKDCVMYASAVVLLILMTARTVYDDGARRVWTLMNVLTLVYKVYYGNALDQAISMWALIISVTSNYSGVVTTVMFLARGIVFMCVEYCPIFFITGNTLQCIMLVYCFLGYFCTCYFGLFCLLNRYFRLTLGVYDYLVSTQEFRYMNSQGLLPPKNSIDAFKLNIKLLGVGGKPCIKVATVQ

SEQ ID NO: 1704 - protein, 83 aa, Severe Acute Respiratory Syndrome coronavirus 2 (SARS-CoV-2)
SKMSDVKCTSVVLLSVLQQLRVESSSKLWAQCVQLHNDILLAKDTTEAFEKMVSLLSVLLSMQGAVDINKLCEEMLDNRATLQ

SEQ ID NO: 1705 - protein, 198 aa, Severe Acute Respiratory Syndrome coronavirus 2 (SARS-CoV-2)
AIASEFSSLPSYAAFATAQEAYEQAVANGDSEVVLKKLKKSLNVAKSEFDRDAAMQRKLEKMADQAMTQMYKQARSEDKRAKVTSAMQTMLFTMLRKLDNDALNNIINNARDGCVPLNIIPLTTAAKLMVVIPDYNTYKNTCDGTTFTYASALWEIQQVVDADSKIVQLSEISMDNSPNLAWPLIVTALRANSAVKLQ

SEQ ID NO: 1706 - protein, 113 aa, Severe Acute Respiratory Syndrome coronavirus 2 (SARS-CoV-2)
NNELSPVALRQMSCAAGTTQTACTDDNALAYYNTTKGGRFVLALLSDLQDLKWARFPKSDGTGTIYTELEPPCRFVTDTPKGPKVKYLYFIKGLNNLNRGMVLGSLAATVRLQ

SEQ ID NO: 1707 - protein, 139 aa, Severe Acute Respiratory Syndrome coronavirus 2 (SARS-CoV-2)
AGNATEVPANSTVLSFCAFAVDAAKAYKDYLASGGQPITNCVKMLCTHTGTGQAITVTPEANMDQESFGGASCCLYCRCHIDHPNPKGFCDLKGKYVQIPTTCANDPVGFTLKNTVCTVCGMWKGYGCSCDQLREPMLQ

SEQ ID NO: 1708 - protein, 932 aa, Severe Acute Respiratory Syndrome coronavirus 2 (SARS-CoV-2)
SADAQSFLNRVCGVSAARLTPCGTGTSTDVVYRAFDIYNDKVAGFAKFLKTNCCRFQEKDEDDNLIDSYFVVKRHTFSNYQHEETIYNLLKDCPAVAKHDFFKFRIDGDMVPHISRQRLTKYTMADLVYALRHFDEGNCDTLKEILVTYNCCDDDYFNKKDWYDFVENPDILRVYANLGERVRQALLKTVQFCDAMRNAGIVGVLTLDNQDLNGNWYDFGDFIQTTPGSGVPVVDSYYSLLMPILTLTRALTAESHVDTDLTKPYIKWDLLKYDFTEERLKLFDRYFKYWDQTYHPNCVNCLDDRCILHCANFNVLFSTVFPPTSFGPLVRKIFVDGVPFVVSTGYHFRELGVVHNQDVNLHSSRLSFKELLVYAADPAMHAASGNLLLDKRTTCFSVAALTNNVAFQTVKPGNFNKDFYDFAVSKGFFKEGSSVELKHFFFAQDGNAAISDYDYYRYNLPTMCDIRQLLFVVEVVDKYFDCYDGGCINANQVIVNNLDKSAGFPFNKWGKARLYYDSMSYEDQDALFAYTKRNVIPTITQMNLKYAISAKNRARTVAGVSICSTMTNRQFHQKLLKSIAATRGATVVIGTSKFYGGWHNMLKTVYSDVENPHLMGWDYPKCDRAMPNMLRIMASLVLARKHTTCCSLSHRFYRLANECAQVLSEMVMCGGSLYVKPGGTSSGDATTAYANSVFNICQAVTANVNALLSTDGNKIADKYVRNLQHRLYECLYRNRDVDTDFVNEFYAYLRKHFSMMILSDDAVVCFNSTYASQGLVASIKNFKSVLYYQNNVFMSEAKCWTETDLTKGPHEFCSQHTMLVKQGDDYVYLPYPDPSRILGAGCFVDDIVKTDGTLMIERFVSLAIDAYPLTKHPNQEYADVFHLYLQYIRKLHDELTGHMLDMYSVMLTNDNTSRYWEPEFYEAMYTPHTVLQ

SEQ ID NO: 1709 - protein, 601 aa, Severe Acute Respiratory Syndrome coronavirus 2 (SARS-CoV-2)
AVGACVLCNSQTSLRCGACIRRPFLCCKCCYDHVISTSHKLVLSVNPYVCNAPGCDVTDVTQLYLGGMSYYCKSHKPPISFPLCANGQVFGLYKNTCVGSDNVTDFNAIATCDWTNAGDYILANTCTERLKLFAAETLKATEETFKLSYGIATVREVLSDRELHLSWEVGKPRPPLNRNYVFTGYRVTKNSKVQIGEYTFEKGDYGDAVVYRGTTTYKLNVGDYFVLTSHTVMPLSAPTLVPQEHYVRITGLYPTLNISDEFSSNVANYQKVGMQKYSTLQGPPGTGKSHFAIGLALYYPSARIVYTACSHAAVDALCEKALKYLPIDKCSRIIPARARVECFDKFKVNSTLEQYVFCTVNALPETTADIVVFDEISMATNYDLSVVNARLRAKHYVYIGDPAQLPAPRTLLTKGTLEPEYFNSVCRLMKTIGPDMFLGTCRRCPAEIVDTVSALVYDNKLKAHKDKSAQCFKMFYKGVITHDVSSAINRPQIGVVREFLTRNPAWRKAVFISPYNSQNAVASKILGLPTQTVDSSQGSEYDYVIFTQTTETAHSCNVNRFNVAITRAKVGILCIMSDRDLYDKLQFTSLEIPRRNVATLQ

SEQ ID NO: 1710 - protein, 527 aa, Severe Acute Respiratory Syndrome coronavirus 2 (SARS-CoV-2)
AENVTGLFKDCSKVITGLHPTQAPTHLSVDTKFKTEGLCVDIPGIPKDMTYRRLISMMGFKMNYQVNGYPNMFITREEAIRHVRAWIGFDVEGCHATREAVGTNLPLQLGFSTGVNLVAVPTGYVDTPNNTDFSRVSAKPPPGDQFKHLIPLMYKGLPWNVVRIKIVQMLSDTLKNLSDRVVFVLWAHGFELTSMKYFVKIGPERTCCLCDRRATCFSTASDTYACWHHSIGFDYVYNPFMIDVQQWGFTGNLQSNHDLYCQVHGNAHVASCDAIMTRCLAVHECFVKRVDWTIEYPIIGDELKINAACRKVQHMVVKAALLADKFPVLHDIGNPKAIKCVPQADVEWKFYDAQPCSDKAYKIEELFYSYATHSDKFTDGVCLFWNCNVDRYPANSIVCRFDTRVLSNLNLPGCDGGSLYVNKHAFHTPAFDKSAFVNLKQLPFFYYSDSPCESHGKQVVSDIDYVPLKSATCITRCNLGGAVCRHHANEYRLYLDAYNMMISAGFSLWVYKQFDTYNLWNTFTRLQ

SEQ ID NO: 1711 - protein, 346 aa, Severe Acute Respiratory Syndrome coronavirus 2 (SARS-CoV-2)
SLENVAFNVVNKGHFDGQQGEVPVSIINNTVYTKVDGVDVELFENKTTLPVNVAFELWAKRNIKPVPEVKILNNLGVDIAANTVIWDYKRDAPAHISTIGVCSMTDIAKKPTETICAPLTVFFDGRVDGQVDLFRNARNGVLITEGSVKGLQPSVGPKQASLNGVTLIGEAVKTQFNYYKKVDGVVQQLPETYFTQSRNLQEFKPRSQMEIDFLELAMDEFIERYKLEGYAFEHIVYGDFSHSQLGGLHLLIGLAKRFKESPFELEDFIPMDSTVKNYFITDAQTGSSKCVCSVIDLLLDDFVEIIKSQDLSVVSKVVKVTIDYTEISFMLWCKDGHVETFYPKLQ

SEQ ID NO: 1712 - protein, 298 aa, Severe Acute Respiratory Syndrome coronavirus 2 (SARS-CoV-2)
SSQAWQPGVAMPNLYKMQRMLLEKCDLQNYGDSATLPKGIMMNVAKYTQLCQYLNTLTLAVPYNMRVIHFGAGSDKGVAPGTAVLRQWLPTGTLLVDSDLNDFVSDADSTLIGDCATVHTANKWDLIISDMYDPKTKNVTKENDSKEGFFTYICGFIQQKLALGGSVAIKITEHSWNADLYKLMGHFAWWTAFVTNVNASSSEAFLIGCNYLGKPREQIDGYVMHANYIFWRNTNPIQLSSYSLFDMSKFPLKLRGTAVMSLKEGQINDMILSLLSKGRLIIRENNRVVISSDVLVNN

SEQ ID NO: 1713 - protein, 17 aa, Severe Acute Respiratory Syndrome coronavirus 2 (SARS-CoV-2)
ANYIFWRNTNPIQLSSY

SEQ ID NO: 1714 - protein, 9 aa, Severe Acute Respiratory Syndrome coronavirus 2 (SARS-CoV-2)
ANYIFWRNT

SEQ ID NO: 1715 - protein, 9 aa, Severe Acute Respiratory Syndrome coronavirus 2 (SARS-CoV-2)
NYIFWRNTN

SEQ ID NO: 1716 - protein, 9 aa, Severe Acute Respiratory Syndrome coronavirus 2 (SARS-CoV-2)
YIFWRNTNP

SEQ ID NO: 1717 - protein, 9 aa, Severe Acute Respiratory Syndrome coronavirus 2 (SARS-CoV-2)
IFWRNTNPI

SEQ ID NO: 1718 - protein, 9 aa, Severe Acute Respiratory Syndrome coronavirus 2 (SARS-CoV-2)
FWRNTNPIQ

SEQ ID NO: 1719 - protein, 9 aa, Severe Acute Respiratory Syndrome coronavirus 2 (SARS-CoV-2)
WRNTNPIQL

SEQ ID NO: 1720 - protein, 9 aa, Severe Acute Respiratory Syndrome coronavirus 2 (SARS-CoV-2)
RNTNPIQLS

SEQ ID NO: 1721 - protein, 9 aa, Severe Acute Respiratory Syndrome coronavirus 2 (SARS-CoV-2)
NTNPIQLSS

SEQ ID NO: 1722 - protein, 9 aa, Severe Acute Respiratory Syndrome coronavirus 2 (SARS-CoV-2)
TNPIQLSSY

SEQ ID NO: 1723 - protein, 23 aa, Severe Acute Respiratory Syndrome coronavirus 2 (SARS-CoV-2)
DTDFVNEFYAYLRKHFSMMILSD

SEQ ID NO: 1724 - protein, 25 aa, Severe Acute Respiratory Syndrome coronavirus 2 (SARS-CoV-2)
DVDTDFVNEFYAYLRKHFSMMILSD

SEQ ID NO: 1725 - protein, 9 aa, Severe Acute Respiratory Syndrome coronavirus 2 (SARS-CoV-2)
DVDTDFVNE

SEQ ID NO: 1726 - protein, 9 aa, Severe Acute Respiratory Syndrome coronavirus 2 (SARS-CoV-2)
VDTDFVNEF

SEQ ID NO: 1727 - protein, 9 aa, Severe Acute Respiratory Syndrome coronavirus 2 (SARS-CoV-2)
DTDFVNEFY

SEQ ID NO: 1728 - protein, 9 aa, Severe Acute Respiratory Syndrome coronavirus 2 (SARS-CoV-2)
TDFVNEFYA

SEQ ID NO: 1729 - protein, 9 aa, Severe Acute Respiratory Syndrome coronavirus 2 (SARS-CoV-2)
DFVNEFYAY

SEQ ID NO: 1730 - protein, 9 aa, Severe Acute Respiratory Syndrome coronavirus 2 (SARS-CoV-2)
FVNEFYAYL

SEQ ID NO: 1731 - protein, 9 aa, Severe Acute Respiratory Syndrome coronavirus 2 (SARS-CoV-2)
VNEFYAYLR

SEQ ID NO: 1732 - protein, 9 aa, Severe Acute Respiratory Syndrome coronavirus 2 (SARS-CoV-2)
NEFYAYLRK

SEQ ID NO: 1733 - protein, 9 aa, Severe Acute Respiratory Syndrome coronavirus 2 (SARS-CoV-2)
EFYAYLRKH

SEQ ID NO: 1734 - protein, 9 aa, Severe Acute Respiratory Syndrome coronavirus 2 (SARS-CoV-2)
FYAYLRKHF

SEQ ID NO: 1735 - protein, 9 aa, Severe Acute Respiratory Syndrome coronavirus 2 (SARS-CoV-2)
YAYLRKHFS

SEQ ID NO: 1736 - protein, 9 aa, Severe Acute Respiratory Syndrome coronavirus 2 (SARS-CoV-2)
AYLRKHFSM

SEQ ID NO: 1737 - protein, 9 aa, Severe Acute Respiratory Syndrome coronavirus 2 (SARS-CoV-2)
YLRKHFSMM

SEQ ID NO: 1738 - protein, 9 aa, Severe Acute Respiratory Syndrome coronavirus 2 (SARS-CoV-2)
LRKHFSMMI

SEQ ID NO: 1739 - protein, 9 aa, Severe Acute Respiratory Syndrome coronavirus 2 (SARS-CoV-2)
RKHFSMMIL

SEQ ID NO: 1740 - protein, 9 aa, Severe Acute Respiratory Syndrome coronavirus 2 (SARS-CoV-2)
KHFSMMILS

SEQ ID NO: 1741 - protein, 9 aa, Severe Acute Respiratory Syndrome coronavirus 2 (SARS-CoV-2)
HFSMMILSD

SEQ ID NO: 1742 - protein, 21 aa, Severe Acute Respiratory Syndrome coronavirus 2 (SARS-CoV-2)
ISMWALIISVTSNYSGVVTTV

SEQ ID NO: 1743 - protein, 9 aa, Severe Acute Respiratory Syndrome coronavirus 2 (SARS-CoV-2)
ISMWALIIS

SEQ ID NO: 1744 - protein, 9 aa, Severe Acute Respiratory Syndrome coronavirus 2 (SARS-CoV-2)
SMWALIISV

SEQ ID NO: 1745 - protein, 9 aa, Severe Acute Respiratory Syndrome coronavirus 2 (SARS-CoV-2)
MWALIISVT

SEQ ID NO: 1746 - protein, 9 aa, Severe Acute Respiratory Syndrome coronavirus 2 (SARS-CoV-2)
WALIISVTS

SEQ ID NO: 1747 - protein, 9 aa, Severe Acute Respiratory Syndrome coronavirus 2 (SARS-CoV-2)
ALIISVTSN

SEQ ID NO: 1748 - protein, 9 aa, Severe Acute Respiratory Syndrome coronavirus 2 (SARS-CoV-2)
LIISVTSNY

SEQ ID NO: 1749 - protein, 9 aa, Severe Acute Respiratory Syndrome coronavirus 2 (SARS-CoV-2)
IISVTSNYS

SEQ ID NO: 1750 - protein, 9 aa, Severe Acute Respiratory Syndrome coronavirus 2 (SARS-CoV-2)
ISVTSNYSG

SEQ ID NO: 1751 - protein, 9 aa, Severe Acute Respiratory Syndrome coronavirus 2 (SARS-CoV-2)
SVTSNYSGV

SEQ ID NO: 1752 - protein, 9 aa, Severe Acute Respiratory Syndrome coronavirus 2 (SARS-CoV-2)
VTSNYSGVV

SEQ ID NO: 1753 - protein, 9 aa, Severe Acute Respiratory Syndrome coronavirus 2 (SARS-CoV-2)
TSNYSGVVT

SEQ ID NO: 1754 - protein, 9 aa, Severe Acute Respiratory Syndrome coronavirus 2 (SARS-CoV-2)
SNYSGVVTT

SEQ ID NO: 1755 - protein, 9 aa, Severe Acute Respiratory Syndrome coronavirus 2 (SARS-CoV-2)
NYSGVVTTV

SEQ ID NO: 1756 - protein, 23 aa, Severe Acute Respiratory Syndrome coronavirus 2 (SARS-CoV-2)
VASIKNFKSVLYYQNNVFMSEAK

SEQ ID NO: 1757 - protein, 9 aa, Severe Acute Respiratory Syndrome coronavirus 2 (SARS-CoV-2)
VASIKNFKS

SEQ ID NO: 1758 - protein, 9 aa, Severe Acute Respiratory Syndrome coronavirus 2 (SARS-CoV-2)
ASIKNFKSV

SEQ ID NO: 1759 - protein, 9 aa, Severe Acute Respiratory Syndrome coronavirus 2 (SARS-CoV-2)
SIKNFKSVL

SEQ ID NO: 1760 - protein, 9 aa, Severe Acute Respiratory Syndrome coronavirus 2 (SARS-CoV-2)
IKNFKSVLY

SEQ ID NO: 1761 - protein, 9 aa, Severe Acute Respiratory Syndrome coronavirus 2 (SARS-CoV-2)
KNFKSVLYY

SEQ ID NO: 1762 - protein, 9 aa, Severe Acute Respiratory Syndrome coronavirus 2 (SARS-CoV-2)
NFKSVLYYQ

SEQ ID NO: 1763 - protein, 9 aa, Severe Acute Respiratory Syndrome coronavirus 2 (SARS-CoV-2)
FKSVLYYQN

SEQ ID NO: 1764 - protein, 9 aa, Severe Acute Respiratory Syndrome coronavirus 2 (SARS-CoV-2)
KSVLYYQNN

SEQ ID NO: 1765 - protein, 9 aa, Severe Acute Respiratory Syndrome coronavirus 2 (SARS-CoV-2)
SVLYYQNNV

SEQ ID NO: 1766 - protein, 9 aa, Severe Acute Respiratory Syndrome coronavirus 2 (SARS-CoV-2)
VLYYQNNVF

SEQ ID NO: 1767 - protein, 9 aa, Severe Acute Respiratory Syndrome coronavirus 2 (SARS-CoV-2)
LYYQNNVFM

SEQ ID NO: 1768 - protein, 9 aa, Severe Acute Respiratory Syndrome coronavirus 2 (SARS-CoV-2)
YYQNNVFMS

SEQ ID NO: 1769 - protein, 9 aa, Severe Acute Respiratory Syndrome coronavirus 2 (SARS-CoV-2)
YQNNVFMSE

SEQ ID NO: 1770 - protein, 9 aa, Severe Acute Respiratory Syndrome coronavirus 2 (SARS-CoV-2)
QNNVFMSEA

SEQ ID NO: 1771 - protein, 9 aa, Severe Acute Respiratory Syndrome coronavirus 2 (SARS-CoV-2)
NNVFMSEAK

SEQ ID NO: 1772 - protein, 17 aa, Severe Acute Respiratory Syndrome coronavirus 2 (SARS-CoV-2)
WPLIVTALRANSAVKLQ

SEQ ID NO: 1773 - protein, 9 aa, Severe Acute Respiratory Syndrome coronavirus 2 (SARS-CoV-2)
WPLIVTALR

SEQ ID NO: 1774 - protein, 9 aa, Severe Acute Respiratory Syndrome coronavirus 2 (SARS-CoV-2)
PLIVTALRA

SEQ ID NO: 1775 - protein, 9 aa, Severe Acute Respiratory Syndrome coronavirus 2 (SARS-CoV-2)
LIVTALRAN

SEQ ID NO: 1776 - protein, 9 aa, Severe Acute Respiratory Syndrome coronavirus 2 (SARS-CoV-2)
IVTALRANS

SEQ ID NO: 1777 - protein, 9 aa, Severe Acute Respiratory Syndrome coronavirus 2 (SARS-CoV-2)
VTALRANSA

SEQ ID NO: 1778 - protein, 9 aa, Severe Acute Respiratory Syndrome coronavirus 2 (SARS-CoV-2)
TALRANSAV

SEQ ID NO: 1779 - protein, 9 aa, Severe Acute Respiratory Syndrome coronavirus 2 (SARS-CoV-2)
ALRANSAVK

SEQ ID NO: 1780 - protein, 9 aa, Severe Acute Respiratory Syndrome coronavirus 2 (SARS-CoV-2)
LRANSAVKL

SEQ ID NO: 1781 - protein, 9 aa, Severe Acute Respiratory Syndrome coronavirus 2 (SARS-CoV-2)
RANSAVKLQ

SEQ ID NO: 1782 - protein, 23 aa, Severe Acute Respiratory Syndrome coronavirus 2 (SARS-CoV-2)
GGNYNYLYRLFRKSNLKPFERDI

SEQ ID NO: 1783 - protein, 25 aa, Severe Acute Respiratory Syndrome coronavirus 2 (SARS-CoV-2)
KVGGNYNYLYRLFRKSNLKPFERDI

SEQ ID NO: 1784 - protein, 9 aa, Severe Acute Respiratory Syndrome coronavirus 2 (SARS-CoV-2)
KVGGNYNYL

SEQ ID NO: 1785 - protein, 9 aa, Severe Acute Respiratory Syndrome coronavirus 2 (SARS-CoV-2)
VGGNYNYLY

SEQ ID NO: 1786 - protein, 9 aa, Severe Acute Respiratory Syndrome coronavirus 2 (SARS-CoV-2)
GGNYNYLYR

SEQ ID NO: 1787 - protein, 9 aa, Severe Acute Respiratory Syndrome coronavirus 2 (SARS-CoV-2)
GNYNYLYRL

SEQ ID NO: 1788 - protein, 9 aa, Severe Acute Respiratory Syndrome coronavirus 2 (SARS-CoV-2)
NYNYLYRLF

SEQ ID NO: 1789 - protein, 9 aa, Severe Acute Respiratory Syndrome coronavirus 2 (SARS-CoV-2)
YNYLYRLFR

SEQ ID NO: 1790 - protein, 9 aa, Severe Acute Respiratory Syndrome coronavirus 2 (SARS-CoV-2)
NYLYRLFRK

SEQ ID NO: 1791 - protein, 9 aa, Severe Acute Respiratory Syndrome coronavirus 2 (SARS-CoV-2)
YLYRLFRKS

SEQ ID NO: 1792 - protein, 9 aa, Severe Acute Respiratory Syndrome coronavirus 2 (SARS-CoV-2)
LYRLFRKSN

SEQ ID NO: 1793 - protein, 9 aa, Severe Acute Respiratory Syndrome coronavirus 2 (SARS-CoV-2)
YRLFRKSNL

SEQ ID NO: 1794 - protein, 9 aa, Severe Acute Respiratory Syndrome coronavirus 2 (SARS-CoV-2)
RLFRKSNLK

SEQ ID NO: 1795 - protein, 9 aa, Severe Acute Respiratory Syndrome coronavirus 2 (SARS-CoV-2)
LFRKSNLKP

SEQ ID NO: 1796 - protein, 9 aa, Severe Acute Respiratory Syndrome coronavirus 2 (SARS-CoV-2)
FRKSNLKPF

SEQ ID NO: 1797 - protein, 9 aa, Severe Acute Respiratory Syndrome coronavirus 2 (SARS-CoV-2)
RKSNLKPFE

SEQ ID NO: 1798 - protein, 9 aa, Severe Acute Respiratory Syndrome coronavirus 2 (SARS-CoV-2)
KSNLKPFER

SEQ ID NO: 1799 - protein, 9 aa, Severe Acute Respiratory Syndrome coronavirus 2 (SARS-CoV-2)
SNLKPFERD

SEQ ID NO: 1800 - protein, 9 aa, Severe Acute Respiratory Syndrome coronavirus 2 (SARS-CoV-2)
NLKPFERDI

SEQ ID NO: 1801 - protein, 18 aa, Severe Acute Respiratory Syndrome coronavirus 2 (SARS-CoV-2)
MPNMLRIMASLVLARKHT

SEQ ID NO: 1802 - protein, 9 aa, Severe Acute Respiratory Syndrome coronavirus 2 (SARS-CoV-2)
MPNMLRIMA

SEQ ID NO: 1803 - protein, 9 aa, Severe Acute Respiratory Syndrome coronavirus 2 (SARS-CoV-2)
PNMLRIMAS

SEQ ID NO: 1804 - protein, 9 aa, Severe Acute Respiratory Syndrome coronavirus 2 (SARS-CoV-2)
NMLRIMASL

SEQ ID NO: 1805 - protein, 9 aa, Severe Acute Respiratory Syndrome coronavirus 2 (SARS-CoV-2)
MLRIMASLV

SEQ ID NO: 1806 - protein, 9 aa, Severe Acute Respiratory Syndrome coronavirus 2 (SARS-CoV-2)
LRIMASLVL

SEQ ID NO: 1807 - protein, 9 aa, Severe Acute Respiratory Syndrome coronavirus 2 (SARS-CoV-2)
RIMASLVLA

SEQ ID NO: 1808 - protein, 9 aa, Severe Acute Respiratory Syndrome coronavirus 2 (SARS-CoV-2)
IMASLVLAR

SEQ ID NO: 1809 - protein, 9 aa, Severe Acute Respiratory Syndrome coronavirus 2 (SARS-CoV-2)
MASLVLARK

SEQ ID NO: 1810 - protein, 9 aa, Severe Acute Respiratory Syndrome coronavirus 2 (SARS-CoV-2)
ASLVLARKH

SEQ ID NO: 1811 - protein, 9 aa, Severe Acute Respiratory Syndrome coronavirus 2 (SARS-CoV-2)
SLVLARKHT

SEQ ID NO: 1812 - protein, 24 aa, Severe Acute Respiratory Syndrome coronavirus 2 (SARS-CoV-2)
LLPLTQYNRYLALYNKYKYFSGAM

SEQ ID NO: 1813 - protein, 25 aa, Severe Acute Respiratory Syndrome coronavirus 2 (SARS-CoV-2)
LLPLTQYNRYLALYNKYKYFSGAMD

SEQ ID NO: 1814 - protein, 9 aa, Severe Acute Respiratory Syndrome coronavirus 2 (SARS-CoV-2)
LLPLTQYNR

SEQ ID NO: 1815 - protein, 9 aa, Severe Acute Respiratory Syndrome coronavirus 2 (SARS-CoV-2)
LPLTQYNRY

SEQ ID NO: 1816 - protein, 9 aa, Severe Acute Respiratory Syndrome coronavirus 2 (SARS-CoV-2)
PLTQYNRYL

SEQ ID NO: 1817 - protein, 9 aa, Severe Acute Respiratory Syndrome coronavirus 2 (SARS-CoV-2)
LTQYNRYLA

SEQ ID NO: 1818 - protein, 9 aa, Severe Acute Respiratory Syndrome coronavirus 2 (SARS-CoV-2)
TQYNRYLAL

SEQ ID NO: 1819 - protein, 9 aa, Severe Acute Respiratory Syndrome coronavirus 2 (SARS-CoV-2)
QYNRYLALY

SEQ ID NO: 1820 - protein, 9 aa, Severe Acute Respiratory Syndrome coronavirus 2 (SARS-CoV-2)
YNRYLALYN

SEQ ID NO: 1821 - protein, 9 aa, Severe Acute Respiratory Syndrome coronavirus 2 (SARS-CoV-2)
NRYLALYNK

SEQ ID NO: 1822 - protein, 9 aa, Severe Acute Respiratory Syndrome coronavirus 2 (SARS-CoV-2)
RYLALYNKY

SEQ ID NO: 1823 - protein, 9 aa, Severe Acute Respiratory Syndrome coronavirus 2 (SARS-CoV-2)
YLALYNKYK

SEQ ID NO: 1824 - protein, 9 aa, Severe Acute Respiratory Syndrome coronavirus 2 (SARS-CoV-2)
LALYNKYKY

SEQ ID NO: 1825 - protein, 9 aa, Severe Acute Respiratory Syndrome coronavirus 2 (SARS-CoV-2)
ALYNKYKYF

SEQ ID NO: 1826 - protein, 9 aa, Severe Acute Respiratory Syndrome coronavirus 2 (SARS-CoV-2)
LYNKYKYFS

SEQ ID NO: 1827 - protein, 9 aa, Severe Acute Respiratory Syndrome coronavirus 2 (SARS-CoV-2)
YNKYKYFSG

SEQ ID NO: 1828 - protein, 9 aa, Severe Acute Respiratory Syndrome coronavirus 2 (SARS-CoV-2)
NKYKYFSGA

SEQ ID NO: 1829 - protein, 9 aa, Severe Acute Respiratory Syndrome coronavirus 2 (SARS-CoV-2)
KYKYFSGAM

SEQ ID NO: 1830 - protein, 9 aa, Severe Acute Respiratory Syndrome coronavirus 2 (SARS-CoV-2)
YKYFSGAMD

SEQ ID NO: 1831 - protein, 18 aa, Severe Acute Respiratory Syndrome coronavirus 2 (SARS-CoV-2)
DMTYRRLISMMGFKMNYQ

SEQ ID NO: 1832 - protein, 19 aa, Severe Acute Respiratory Syndrome coronavirus 2 (SARS-CoV-2)
DMTYRRLISMMGFKMNYQV

SEQ ID NO: 1833 - protein, 9 aa, Severe Acute Respiratory Syndrome coronavirus 2 (SARS-CoV-2)
DMTYRRLIS

SEQ ID NO: 1834 - protein, 9 aa, Severe Acute Respiratory Syndrome coronavirus 2 (SARS-CoV-2)
MTYRRLISM

SEQ ID NO: 1835 - protein, 9 aa, Severe Acute Respiratory Syndrome coronavirus 2 (SARS-CoV-2)
TYRRLISMM

SEQ ID NO: 1836 - protein, 9 aa, Severe Acute Respiratory Syndrome coronavirus 2 (SARS-CoV-2)
YRRLISMMG

SEQ ID NO: 1837 - protein, 9 aa, Severe Acute Respiratory Syndrome coronavirus 2 (SARS-CoV-2)
RRLISMMGF

SEQ ID NO: 1838 - protein, 9 aa, Severe Acute Respiratory Syndrome coronavirus 2 (SARS-CoV-2)
RLISMMGFK

SEQ ID NO: 1839 - protein, 9 aa, Severe Acute Respiratory Syndrome coronavirus 2 (SARS-CoV-2)
LISMMGFKM

SEQ ID NO: 1840 - protein, 9 aa, Severe Acute Respiratory Syndrome coronavirus 2 (SARS-CoV-2)
ISMMGFKMN

SEQ ID NO: 1841 - protein, 9 aa, Severe Acute Respiratory Syndrome coronavirus 2 (SARS-CoV-2)
SMMGFKMNY

SEQ ID NO: 1842 - protein, 9 aa, Severe Acute Respiratory Syndrome coronavirus 2 (SARS-CoV-2)
MMGFKMNYQ

SEQ ID NO: 1843 - protein, 9 aa, Severe Acute Respiratory Syndrome coronavirus 2 (SARS-CoV-2)
MGFKMNYQV

SEQ ID NO: 1844 - protein, 23 aa, Severe Acute Respiratory Syndrome coronavirus 2 (SARS-CoV-2)
GDQFKHLIPLMYKGLPWNVVRIK

SEQ ID NO: 1845 - protein, 9 aa, Severe Acute Respiratory Syndrome coronavirus 2 (SARS-CoV-2)
GDQFKHLIP

SEQ ID NO: 1846 - protein, 9 aa, Severe Acute Respiratory Syndrome coronavirus 2 (SARS-CoV-2)
DQFKHLIPL

SEQ ID NO: 1847 - protein, 9 aa, Severe Acute Respiratory Syndrome coronavirus 2 (SARS-CoV-2)
QFKHLIPLM

SEQ ID NO: 1848 - protein, 9 aa, Severe Acute Respiratory Syndrome coronavirus 2 (SARS-CoV-2)
FKHLIPLMY

SEQ ID NO: 1849 - protein, 9 aa, Severe Acute Respiratory Syndrome coronavirus 2 (SARS-CoV-2)
KHLIPLMYK

SEQ ID NO: 1850 - protein, 9 aa, Severe Acute Respiratory Syndrome coronavirus 2 (SARS-CoV-2)
HLIPLMYKG

SEQ ID NO: 1851 - protein, 9 aa, Severe Acute Respiratory Syndrome coronavirus 2 (SARS-CoV-2)
LIPLMYKGL

SEQ ID NO: 1852 - protein, 9 aa, Severe Acute Respiratory Syndrome coronavirus 2 (SARS-CoV-2)
IPLMYKGLP

SEQ ID NO: 1853 - protein, 9 aa, Severe Acute Respiratory Syndrome coronavirus 2 (SARS-CoV-2)
PLMYKGLPW

SEQ ID NO: 1854 - protein, 9 aa, Severe Acute Respiratory Syndrome coronavirus 2 (SARS-CoV-2)
LMYKGLPWN

SEQ ID NO: 1855 - protein, 9 aa, Severe Acute Respiratory Syndrome coronavirus 2 (SARS-CoV-2)
MYKGLPWNV

SEQ ID NO: 1856 - protein, 9 aa, Severe Acute Respiratory Syndrome coronavirus 2 (SARS-CoV-2)
YKGLPWNVV

SEQ ID NO: 1857 - protein, 9 aa, Severe Acute Respiratory Syndrome coronavirus 2 (SARS-CoV-2)
KGLPWNVVR

SEQ ID NO: 1858 - protein, 9 aa, Severe Acute Respiratory Syndrome coronavirus 2 (SARS-CoV-2)
GLPWNVVRI

SEQ ID NO: 1859 - protein, 9 aa, Severe Acute Respiratory Syndrome coronavirus 2 (SARS-CoV-2)
LPWNVVRIK

SEQ ID NO: 1860 - protein, 21 aa, Severe Acute Respiratory Syndrome coronavirus 2 (SARS-CoV-2)
ITQMNLKYAISAKNRARTVAG

SEQ ID NO: 1861 - protein, 24 aa, Severe Acute Respiratory Syndrome coronavirus 2 (SARS-CoV-2)
IPTITQMNLKYAISAKNRARTVAG

SEQ ID NO: 1862 - protein, 9 aa, Severe Acute Respiratory Syndrome coronavirus 2 (SARS-CoV-2)
IPTITQMNL

SEQ ID NO: 1863 - protein, 9 aa, Severe Acute Respiratory Syndrome coronavirus 2 (SARS-CoV-2)
PTITQMNLK

SEQ ID NO: 1864 - protein, 9 aa, Severe Acute Respiratory Syndrome coronavirus 2 (SARS-CoV-2)
TITQMNLKY

SEQ ID NO: 1865 - protein, 9 aa, Severe Acute Respiratory Syndrome coronavirus 2 (SARS-CoV-2)
ITQMNLKYA

SEQ ID NO: 1866 - protein, 9 aa, Severe Acute Respiratory Syndrome coronavirus 2 (SARS-CoV-2)
TQMNLKYAI

SEQ ID NO: 1867 - protein, 9 aa, Severe Acute Respiratory Syndrome coronavirus 2 (SARS-CoV-2)
QMNLKYAIS

SEQ ID NO: 1868 - protein, 9 aa, Severe Acute Respiratory Syndrome coronavirus 2 (SARS-CoV-2)
MNLKYAISA

SEQ ID NO: 1869 - protein, 9 aa, Severe Acute Respiratory Syndrome coronavirus 2 (SARS-CoV-2)
NLKYAISAK

SEQ ID NO: 1870 - protein, 9 aa, Severe Acute Respiratory Syndrome coronavirus 2 (SARS-CoV-2)
LKYAISAKN

SEQ ID NO: 1871 - protein, 9 aa, Severe Acute Respiratory Syndrome coronavirus 2 (SARS-CoV-2)
KYAISAKNR

SEQ ID NO: 1872 - protein, 9 aa, Severe Acute Respiratory Syndrome coronavirus 2 (SARS-CoV-2)
YAISAKNRA

SEQ ID NO: 1873 - protein, 9 aa, Severe Acute Respiratory Syndrome coronavirus 2 (SARS-CoV-2)
AISAKNRAR

SEQ ID NO: 1874 - protein, 9 aa, Severe Acute Respiratory Syndrome coronavirus 2 (SARS-CoV-2)
ISAKNRART

SEQ ID NO: 1875 - protein, 9 aa, Severe Acute Respiratory Syndrome coronavirus 2 (SARS-CoV-2)
SAKNRARTV

SEQ ID NO: 1876 - protein, 9 aa, Severe Acute Respiratory Syndrome coronavirus 2 (SARS-CoV-2)
AKNRARTVA

SEQ ID NO: 1877 - protein, 9 aa, Severe Acute Respiratory Syndrome coronavirus 2 (SARS-CoV-2)
KNRARTVAG

SEQ ID NO: 1878 - protein, 18 aa, Severe Acute Respiratory Syndrome coronavirus 2 (SARS-CoV-2)
TAFVTNVNASSSEAFLIG

SEQ ID NO: 1879 - protein, 15 aa, Severe Acute Respiratory Syndrome coronavirus 2 (SARS-CoV-2)
TAFVTNVNASSSEAF

SEQ ID NO: 1880 - protein, 9 aa, Severe Acute Respiratory Syndrome coronavirus 2 (SARS-CoV-2)
TAFVTNVNA

SEQ ID NO: 1881 - protein, 9 aa, Severe Acute Respiratory Syndrome coronavirus 2 (SARS-CoV-2)
AFVTNVNAS

SEQ ID NO: 1882 - protein, 9 aa, Severe Acute Respiratory Syndrome coronavirus 2 (SARS-CoV-2)
FVTNVNASS

SEQ ID NO: 1883 - protein, 9 aa, Severe Acute Respiratory Syndrome coronavirus 2 (SARS-CoV-2)
VTNVNASSS

SEQ ID NO: 1884 - protein, 9 aa, Severe Acute Respiratory Syndrome coronavirus 2 (SARS-CoV-2)
TNVNASSSE

SEQ ID NO: 1885 - protein, 9 aa, Severe Acute Respiratory Syndrome coronavirus 2 (SARS-CoV-2)
NVNASSSEA

SEQ ID NO: 1886 - protein, 9 aa, Severe Acute Respiratory Syndrome coronavirus 2 (SARS-CoV-2)
VNASSSEAF

SEQ ID NO: 1887 - protein, 9 aa, Severe Acute Respiratory Syndrome coronavirus 2 (SARS-CoV-2)
NASSSEAFL

SEQ ID NO: 1888 - protein, 9 aa, Severe Acute Respiratory Syndrome coronavirus 2 (SARS-CoV-2)
ASSSEAFLI

SEQ ID NO: 1889 - protein, 9 aa, Severe Acute Respiratory Syndrome coronavirus 2 (SARS-CoV-2)
SSSEAFLIG

SEQ ID NO: 1890 - protein, 14 aa, Severe Acute Respiratory Syndrome coronavirus 2 (SARS-CoV-2)
LYFIKGLNNLNRGM

SEQ ID NO: 1891 - protein, 13 aa, Severe Acute Respiratory Syndrome coronavirus 2 (SARS-CoV-2)
LYFIKGLNNLNRG

SEQ ID NO: 1892 - protein, 9 aa, Severe Acute Respiratory Syndrome coronavirus 2 (SARS-CoV-2)
LYFIKGLNN

SEQ ID NO: 1893 - protein, 9 aa, Severe Acute Respiratory Syndrome coronavirus 2 (SARS-CoV-2)
YFIKGLNNL

SEQ ID NO: 1894 - protein, 9 aa, Severe Acute Respiratory Syndrome coronavirus 2 (SARS-CoV-2)
FIKGLNNLN

SEQ ID NO: 1895 - protein, 9 aa, Severe Acute Respiratory Syndrome coronavirus 2 (SARS-CoV-2)
IKGLNNLNR

SEQ ID NO: 1896 - protein, 9 aa, Severe Acute Respiratory Syndrome coronavirus 2 (SARS-CoV-2)
KGLNNLNRG

SEQ ID NO: 1897 - protein, 9 aa, Severe Acute Respiratory Syndrome coronavirus 2 (SARS-CoV-2)
GLNNLNRGM

SEQ ID NO: 1898 - protein, 22 aa, Severe Acute Respiratory Syndrome coronavirus 2 (SARS-CoV-2)
RKAVFISPYNSQNAVASKILGL

SEQ ID NO: 1899 - protein, 9 aa, Severe Acute Respiratory Syndrome coronavirus 2 (SARS-CoV-2)
RKAVFISPY

SEQ ID NO: 1900 - protein, 9 aa, Severe Acute Respiratory Syndrome coronavirus 2 (SARS-CoV-2)
KAVFISPYN

SEQ ID NO: 1901 - protein, 9 aa, Severe Acute Respiratory Syndrome coronavirus 2 (SARS-CoV-2)
AVFISPYNS

SEQ ID NO: 1902 - protein, 9 aa, Severe Acute Respiratory Syndrome coronavirus 2 (SARS-CoV-2)
VFISPYNSQ

SEQ ID NO: 1903 - protein, 9 aa, Severe Acute Respiratory Syndrome coronavirus 2 (SARS-CoV-2)
FISPYNSQN

SEQ ID NO: 1904 - protein, 9 aa, Severe Acute Respiratory Syndrome coronavirus 2 (SARS-CoV-2)
ISPYNSQNA

SEQ ID NO: 1905 - protein, 9 aa, Severe Acute Respiratory Syndrome coronavirus 2 (SARS-CoV-2)
SPYNSQNAV

SEQ ID NO: 1906 - protein, 9 aa, Severe Acute Respiratory Syndrome coronavirus 2 (SARS-CoV-2)
PYNSQNAVA

SEQ ID NO: 1907 - protein, 9 aa, Severe Acute Respiratory Syndrome coronavirus 2 (SARS-CoV-2)
YNSQNAVAS

SEQ ID NO: 1908 - protein, 9 aa, Severe Acute Respiratory Syndrome coronavirus 2 (SARS-CoV-2)
NSQNAVASK

SEQ ID NO: 1909 - protein, 9 aa, Severe Acute Respiratory Syndrome coronavirus 2 (SARS-CoV-2)
SQNAVASKI

SEQ ID NO: 1910 - protein, 9 aa, Severe Acute Respiratory Syndrome coronavirus 2 (SARS-CoV-2)
QNAVASKIL

SEQ ID NO: 1911 - protein, 9 aa, Severe Acute Respiratory Syndrome coronavirus 2 (SARS-CoV-2)
NAVASKILG

SEQ ID NO: 1912 - protein, 9 aa, Severe Acute Respiratory Syndrome coronavirus 2 (SARS-CoV-2)
AVASKILGL

SEQ ID NO: 1913 - protein, 22 aa, Severe Acute Respiratory Syndrome coronavirus 2 (SARS-CoV-2)
VDAVNLLTNMFTPLIQPIGALD

SEQ ID NO: 1914 - protein, 9 aa, Severe Acute Respiratory Syndrome coronavirus 2 (SARS-CoV-2)
VDAVNLLTN

SEQ ID NO: 1915 - protein, 9 aa, Severe Acute Respiratory Syndrome coronavirus 2 (SARS-CoV-2)
DAVNLLTNM

SEQ ID NO: 1916 - protein, 9 aa, Severe Acute Respiratory Syndrome coronavirus 2 (SARS-CoV-2)
AVNLLTNMF

SEQ ID NO: 1917 - protein, 9 aa, Severe Acute Respiratory Syndrome coronavirus 2 (SARS-CoV-2)
VNLLTNMFT

SEQ ID NO: 1918 - protein, 9 aa, Severe Acute Respiratory Syndrome coronavirus 2 (SARS-CoV-2)
NLLTNMFTP

SEQ ID NO: 1919 - protein, 9 aa, Severe Acute Respiratory Syndrome coronavirus 2 (SARS-CoV-2)
LLTNMFTPL

SEQ ID NO: 1920 - protein, 9 aa, Severe Acute Respiratory Syndrome coronavirus 2 (SARS-CoV-2)
LTNMFTPLI

SEQ ID NO: 1921 - protein, 9 aa, Severe Acute Respiratory Syndrome coronavirus 2 (SARS-CoV-2)
TNMFTPLIQ

SEQ ID NO: 1922 - protein, 9 aa, Severe Acute Respiratory Syndrome coronavirus 2 (SARS-CoV-2)
NMFTPLIQP

SEQ ID NO: 1923 - protein, 9 aa, Severe Acute Respiratory Syndrome coronavirus 2 (SARS-CoV-2)
MFTPLIQPI

SEQ ID NO: 1924 - protein, 9 aa, Severe Acute Respiratory Syndrome coronavirus 2 (SARS-CoV-2)
FTPLIQPIG

SEQ ID NO: 1925 - protein, 9 aa, Severe Acute Respiratory Syndrome coronavirus 2 (SARS-CoV-2)
TPLIQPIGA

SEQ ID NO: 1926 - protein, 9 aa, Severe Acute Respiratory Syndrome coronavirus 2 (SARS-CoV-2)
PLIQPIGAL

SEQ ID NO: 1927 - protein, 9 aa, Severe Acute Respiratory Syndrome coronavirus 2 (SARS-CoV-2)
LIQPIGALD

SEQ ID NO: 1928 - protein, 17 aa, Severe Acute Respiratory Syndrome coronavirus 2 (SARS-CoV-2)
KGRLIIRENNRVVISSD

SEQ ID NO: 1929 - protein, 16 aa, Severe Acute Respiratory Syndrome coronavirus 2 (SARS-CoV-2)
KGRLIIRENNRVVISS

SEQ ID NO: 1930 - protein, 9 aa, Severe Acute Respiratory Syndrome coronavirus 2 (SARS-CoV-2)
KGRLIIREN

SEQ ID NO: 1931 - protein, 9 aa, Severe Acute Respiratory Syndrome coronavirus 2 (SARS-CoV-2)
GRLIIRENN

SEQ ID NO: 1932 - protein, 9 aa, Severe Acute Respiratory Syndrome coronavirus 2 (SARS-CoV-2)
RLIIRENNR

SEQ ID NO: 1933 - protein, 9 aa, Severe Acute Respiratory Syndrome coronavirus 2 (SARS-CoV-2)
LIIRENNRV

SEQ ID NO: 1934 - protein, 9 aa, Severe Acute Respiratory Syndrome coronavirus 2 (SARS-CoV-2)
IIRENNRVV

SEQ ID NO: 1935 - protein, 9 aa, Severe Acute Respiratory Syndrome coronavirus 2 (SARS-CoV-2)
IRENNRVVI

SEQ ID NO: 1936 - protein, 9 aa, Severe Acute Respiratory Syndrome coronavirus 2 (SARS-CoV-2)
RENNRVVIS

SEQ ID NO: 1937 - protein, 9 aa, Severe Acute Respiratory Syndrome coronavirus 2 (SARS-CoV-2)
ENNRVVISS

SEQ ID NO: 1938 - protein, 9 aa, Severe Acute Respiratory Syndrome coronavirus 2 (SARS-CoV-2)
NNRVVISSD

SEQ ID NO: 1939 - protein, 17 aa, Severe Acute Respiratory Syndrome coronavirus 2 (SARS-CoV-2)
TERLKLFAAETLKATEE

SEQ ID NO: 1940 - protein, 9 aa, Severe Acute Respiratory Syndrome coronavirus 2 (SARS-CoV-2)
TERLKLFAA

SEQ ID NO: 1941 - protein, 9 aa, Severe Acute Respiratory Syndrome coronavirus 2 (SARS-CoV-2)
ERLKLFAAE

SEQ ID NO: 1942 - protein, 9 aa, Severe Acute Respiratory Syndrome coronavirus 2 (SARS-CoV-2)
RLKLFAAET

SEQ ID NO: 1943 - protein, 9 aa, Severe Acute Respiratory Syndrome coronavirus 2 (SARS-CoV-2)
LKLFAAETL

SEQ ID NO: 1944 - protein, 9 aa, Severe Acute Respiratory Syndrome coronavirus 2 (SARS-CoV-2)
KLFAAETLK

SEQ ID NO: 1945 - protein, 9 aa, Severe Acute Respiratory Syndrome coronavirus 2 (SARS-CoV-2)
LFAAETLKA

SEQ ID NO: 1946 - protein, 9 aa, Severe Acute Respiratory Syndrome coronavirus 2 (SARS-CoV-2)
FAAETLKAT

SEQ ID NO: 1947 - protein, 9 aa, Severe Acute Respiratory Syndrome coronavirus 2 (SARS-CoV-2)
AAETLKATE

SEQ ID NO: 1948 - protein, 9 aa, Severe Acute Respiratory Syndrome coronavirus 2 (SARS-CoV-2)
AETLKATEE

SEQ ID NO: 1949 - protein, 22 aa, Severe Acute Respiratory Syndrome coronavirus 2 (SARS-CoV-2)
SSNVNRFNVAITRAKVGILSIM

SEQ ID NO: 1950 - protein, 9 aa, Severe Acute Respiratory Syndrome coronavirus 2 (SARS-CoV-2)
SSNVNRFNV

SEQ ID NO: 1951 - protein, 9 aa, Severe Acute Respiratory Syndrome coronavirus 2 (SARS-CoV-2)
SNVNRFNVA

SEQ ID NO: 1952 - protein, 9 aa, Severe Acute Respiratory Syndrome coronavirus 2 (SARS-CoV-2)
NVNRFNVAI

SEQ ID NO: 1953 - protein, 9 aa, Severe Acute Respiratory Syndrome coronavirus 2 (SARS-CoV-2)
VNRFNVAIT

SEQ ID NO: 1954 - protein, 9 aa, Severe Acute Respiratory Syndrome coronavirus 2 (SARS-CoV-2)
NRFNVAITR

SEQ ID NO: 1955 - protein, 9 aa, Severe Acute Respiratory Syndrome coronavirus 2 (SARS-CoV-2)
RFNVAITRA

SEQ ID NO: 1956 - protein, 9 aa, Severe Acute Respiratory Syndrome coronavirus 2 (SARS-CoV-2)
FNVAITRAK

SEQ ID NO: 1957 - protein, 9 aa, Severe Acute Respiratory Syndrome coronavirus 2 (SARS-CoV-2)
NVAITRAKV

SEQ ID NO: 1958 - protein, 9 aa, Severe Acute Respiratory Syndrome coronavirus 2 (SARS-CoV-2)
VAITRAKVG

SEQ ID NO: 1959 - protein, 9 aa, Severe Acute Respiratory Syndrome coronavirus 2 (SARS-CoV-2)
AITRAKVGI

SEQ ID NO: 1960 - protein, 9 aa, Severe Acute Respiratory Syndrome coronavirus 2 (SARS-CoV-2)
ITRAKVGIL

SEQ ID NO: 1961 - protein, 9 aa, Severe Acute Respiratory Syndrome coronavirus 2 (SARS-CoV-2)
TRAKVGILS

SEQ ID NO: 1962 - protein, 9 aa, Severe Acute Respiratory Syndrome coronavirus 2 (SARS-CoV-2)
RAKVGILSI

SEQ ID NO: 1963 - protein, 9 aa, Severe Acute Respiratory Syndrome coronavirus 2 (SARS-CoV-2)
AKVGILSIM

SEQ ID NO: 1964 - protein, 16 aa, Severe Acute Respiratory Syndrome coronavirus 2 (SARS-CoV-2)
GGSLYVNKHAFHTPAF

SEQ ID NO: 1965 - protein, 17 aa, Severe Acute Respiratory Syndrome coronavirus 2 (SARS-CoV-2)
GGSLYVNKHAFHTPAFD

SEQ ID NO: 1966 - protein, 9 aa, Severe Acute Respiratory Syndrome coronavirus 2 (SARS-CoV-2)
GGSLYVNKH

SEQ ID NO: 1967 - protein, 9 aa, Severe Acute Respiratory Syndrome coronavirus 2 (SARS-CoV-2)
GSLYVNKHA

SEQ ID NO: 1968 - protein, 9 aa, Severe Acute Respiratory Syndrome coronavirus 2 (SARS-CoV-2)
SLYVNKHAF

SEQ ID NO: 1969 - protein, 9 aa, Severe Acute Respiratory Syndrome coronavirus 2 (SARS-CoV-2)
LYVNKHAFH

SEQ ID NO: 1970 - protein, 9 aa, Severe Acute Respiratory Syndrome coronavirus 2 (SARS-CoV-2)
YVNKHAFHT

SEQ ID NO: 1971 - protein, 9 aa, Severe Acute Respiratory Syndrome coronavirus 2 (SARS-CoV-2)
VNKHAFHTP

SEQ ID NO: 1972 - protein, 9 aa, Severe Acute Respiratory Syndrome coronavirus 2 (SARS-CoV-2)
NKHAFHTPA

SEQ ID NO: 1973 - protein, 9 aa, Severe Acute Respiratory Syndrome coronavirus 2 (SARS-CoV-2)
KHAFHTPAF

SEQ ID NO: 1974 - protein, 9 aa, Severe Acute Respiratory Syndrome coronavirus 2 (SARS-CoV-2)
HAFHTPAFD

SEQ ID NO: 1975 - protein, 17 aa, Severe Acute Respiratory Syndrome coronavirus 2 (SARS-CoV-2)
TQSLLIVNNATNVVIKV

SEQ ID NO: 1976 - protein, 9 aa, Severe Acute Respiratory Syndrome coronavirus 2 (SARS-CoV-2)
TQSLLIVNN

SEQ ID NO: 1977 - protein, 9 aa, Severe Acute Respiratory Syndrome coronavirus 2 (SARS-CoV-2)
QSLLIVNNA

SEQ ID NO: 1978 - protein, 9 aa, Severe Acute Respiratory Syndrome coronavirus 2 (SARS-CoV-2)
SLLIVNNAT

SEQ ID NO: 1979 - protein, 9 aa, Severe Acute Respiratory Syndrome coronavirus 2 (SARS-CoV-2)
LLIVNNATN

SEQ ID NO: 1980 - protein, 9 aa, Severe Acute Respiratory Syndrome coronavirus 2 (SARS-CoV-2)
LIVNNATNV

SEQ ID NO: 1981 - protein, 9 aa, Severe Acute Respiratory Syndrome coronavirus 2 (SARS-CoV-2)
IVNNATNVV

SEQ ID NO: 1982 - protein, 9 aa, Severe Acute Respiratory Syndrome coronavirus 2 (SARS-CoV-2)
VNNATNVVI

SEQ ID NO: 1983 - protein, 9 aa, Severe Acute Respiratory Syndrome coronavirus 2 (SARS-CoV-2)
NNATNVVIK

SEQ ID NO: 1984 - protein, 9 aa, Severe Acute Respiratory Syndrome coronavirus 2 (SARS-CoV-2)
NATNVVIKV

SEQ ID NO: 1985 - protein, 21 aa, Severe Acute Respiratory Syndrome coronavirus 2 (SARS-CoV-2)
LSHFVNLDNLRANNTKGSLPI

SEQ ID NO: 1986 - protein, 9 aa, Severe Acute Respiratory Syndrome coronavirus 2 (SARS-CoV-2)
LSHFVNLDN

SEQ ID NO: 1987 - protein, 9 aa, Severe Acute Respiratory Syndrome coronavirus 2 (SARS-CoV-2)
SHFVNLDNL

SEQ ID NO: 1988 - protein, 9 aa, Severe Acute Respiratory Syndrome coronavirus 2 (SARS-CoV-2)
HFVNLDNLR

SEQ ID NO: 1989 - protein, 9 aa, Severe Acute Respiratory Syndrome coronavirus 2 (SARS-CoV-2)
FVNLDNLRA

SEQ ID NO: 1990 - protein, 9 aa, Severe Acute Respiratory Syndrome coronavirus 2 (SARS-CoV-2)
VNLDNLRAN

SEQ ID NO: 1991 - protein, 9 aa, Severe Acute Respiratory Syndrome coronavirus 2 (SARS-CoV-2)
NLDNLRANN

SEQ ID NO: 1992 - protein, 9 aa, Severe Acute Respiratory Syndrome coronavirus 2 (SARS-CoV-2)
LDNLRANNT

SEQ ID NO: 1993 - protein, 9 aa, Severe Acute Respiratory Syndrome coronavirus 2 (SARS-CoV-2)
DNLRANNTK

SEQ ID NO: 1994 - protein, 9 aa, Severe Acute Respiratory Syndrome coronavirus 2 (SARS-CoV-2)
NLRANNTKG

SEQ ID NO: 1995 - protein, 9 aa, Severe Acute Respiratory Syndrome coronavirus 2 (SARS-CoV-2)
LRANNTKGS

SEQ ID NO: 1996 - protein, 9 aa, Severe Acute Respiratory Syndrome coronavirus 2 (SARS-CoV-2)
RANNTKGSL

SEQ ID NO: 1997 - protein, 9 aa, Severe Acute Respiratory Syndrome coronavirus 2 (SARS-CoV-2)
ANNTKGSLP

SEQ ID NO: 1998 - protein, 9 aa, Severe Acute Respiratory Syndrome coronavirus 2 (SARS-CoV-2)
NNTKGSLPI

SEQ ID NO: 1999 - protein, 19 aa, Severe Acute Respiratory Syndrome coronavirus 2 (SARS-CoV-2)
YEDLLIRKSNHNFLVQAGN

SEQ ID NO: 2000 - protein, 9 aa, Severe Acute Respiratory Syndrome coronavirus 2 (SARS-CoV-2)
YEDLLIRKS

SEQ ID NO: 2001 - protein, 9 aa, Severe Acute Respiratory Syndrome coronavirus 2 (SARS-CoV-2)
EDLLIRKSN

SEQ ID NO: 2002 - protein, 9 aa, Severe Acute Respiratory Syndrome coronavirus 2 (SARS-CoV-2)
DLLIRKSNH

SEQ ID NO: 2003 - protein, 9 aa, Severe Acute Respiratory Syndrome coronavirus 2 (SARS-CoV-2)
LLIRKSNHN

SEQ ID NO: 2004 - protein, 9 aa, Severe Acute Respiratory Syndrome coronavirus 2 (SARS-CoV-2)
LIRKSNHNF

SEQ ID NO: 2005 - protein, 9 aa, Severe Acute Respiratory Syndrome coronavirus 2 (SARS-CoV-2)
IRKSNHNFL

SEQ ID NO: 2006 - protein, 9 aa, Severe Acute Respiratory Syndrome coronavirus 2 (SARS-CoV-2)
RKSNHNFLV

SEQ ID NO: 2007 - protein, 9 aa, Severe Acute Respiratory Syndrome coronavirus 2 (SARS-CoV-2)
KSNHNFLVQ

SEQ ID NO: 2008 - protein, 9 aa, Severe Acute Respiratory Syndrome coronavirus 2 (SARS-CoV-2)
SNHNFLVQA

SEQ ID NO: 2009 - protein, 9 aa, Severe Acute Respiratory Syndrome coronavirus 2 (SARS-CoV-2)
NHNFLVQAG

SEQ ID NO: 2010 - protein, 9 aa, Severe Acute Respiratory Syndrome coronavirus 2 (SARS-CoV-2)
HNFLVQAGN

SEQ ID NO: 2011 - protein, 9 aa, Severe Acute Respiratory Syndrome coronavirus 2 (SARS-CoV-2)
NPIQLSSYG

SEQ ID NO: 2012 - protein, 9 aa, Severe Acute Respiratory Syndrome coronavirus 2 (SARS-CoV-2)
PIQLSSYGP

SEQ ID NO: 2013 - protein, 9 aa, Severe Acute Respiratory Syndrome coronavirus 2 (SARS-CoV-2)
IQLSSYGPG

SEQ ID NO: 2014 - protein, 9 aa, Severe Acute Respiratory Syndrome coronavirus 2 (SARS-CoV-2)
QLSSYGPGP

SEQ ID NO: 2015 - protein, 9 aa, Severe Acute Respiratory Syndrome coronavirus 2 (SARS-CoV-2)
LSSYGPGPG

SEQ ID NO: 2016 - protein, 9 aa, Severe Acute Respiratory Syndrome coronavirus 2 (SARS-CoV-2)
SSYGPGPGD

SEQ ID NO: 2017 - protein, 9 aa, Severe Acute Respiratory Syndrome coronavirus 2 (SARS-CoV-2)
SYGPGPGDV

SEQ ID NO: 2018 - protein, 9 aa, Severe Acute Respiratory Syndrome coronavirus 2 (SARS-CoV-2)
YGPGPGDVD

SEQ ID NO: 2019 - protein, 9 aa, Severe Acute Respiratory Syndrome coronavirus 2 (SARS-CoV-2)
GPGPGDVDT

SEQ ID NO: 2020 - protein, 9 aa, Severe Acute Respiratory Syndrome coronavirus 2 (SARS-CoV-2)
PGPGDVDTD

SEQ ID NO: 2021 - protein, 9 aa, Severe Acute Respiratory Syndrome coronavirus 2 (SARS-CoV-2)
GPGDVDTDF

SEQ ID NO: 2022 - protein, 9 aa, Severe Acute Respiratory Syndrome coronavirus 2 (SARS-CoV-2)
PGDVDTDFV

SEQ ID NO: 2023 - protein, 9 aa, Severe Acute Respiratory Syndrome coronavirus 2 (SARS-CoV-2)
GDVDTDFVN

SEQ ID NO: 2024 - protein, 9 aa, Severe Acute Respiratory Syndrome coronavirus 2 (SARS-CoV-2)
YSGVVTTVG

SEQ ID NO: 2025 - protein, 9 aa, Severe Acute Respiratory Syndrome coronavirus 2 (SARS-CoV-2)
SGVVTTVGP

SEQ ID NO: 2026 - protein, 9 aa, Severe Acute Respiratory Syndrome coronavirus 2 (SARS-CoV-2)
GVVTTVGPG

SEQ ID NO: 2027 - protein, 9 aa, Severe Acute Respiratory Syndrome coronavirus 2 (SARS-CoV-2)
VVTTVGPGP

SEQ ID NO: 2028 - protein, 9 aa, Severe Acute Respiratory Syndrome coronavirus 2 (SARS-CoV-2)
VTTVGPGPG

SEQ ID NO: 2029 - protein, 9 aa, Severe Acute Respiratory Syndrome coronavirus 2 (SARS-CoV-2)
TTVGPGPGV

SEQ ID NO: 2030 - protein, 9 aa, Severe Acute Respiratory Syndrome coronavirus 2 (SARS-CoV-2)
TVGPGPGVA

SEQ ID NO: 2031 - protein, 9 aa, Severe Acute Respiratory Syndrome coronavirus 2 (SARS-CoV-2)
VGPGPGVAS

SEQ ID NO: 2032 - protein, 9 aa, Severe Acute Respiratory Syndrome coronavirus 2 (SARS-CoV-2)
GPGPGVASI

SEQ ID NO: 2033 - protein, 9 aa, Severe Acute Respiratory Syndrome coronavirus 2 (SARS-CoV-2)
PGPGVASIK

SEQ ID NO: 2034 - protein, 9 aa, Severe Acute Respiratory Syndrome coronavirus 2 (SARS-CoV-2)
GPGVASIKN

SEQ ID NO: 2035 - protein, 9 aa, Severe Acute Respiratory Syndrome coronavirus 2 (SARS-CoV-2)
PGVASIKNF

SEQ ID NO: 2036 - protein, 9 aa, Severe Acute Respiratory Syndrome coronavirus 2 (SARS-CoV-2)
GVASIKNFK

SEQ ID NO: 2037 - protein, 9 aa, Severe Acute Respiratory Syndrome coronavirus 2 (SARS-CoV-2)
ANSAVKLQK

SEQ ID NO: 2038 - protein, 9 aa, Severe Acute Respiratory Syndrome coronavirus 2 (SARS-CoV-2)
NSAVKLQKV

SEQ ID NO: 2039 - protein, 9 aa, Severe Acute Respiratory Syndrome coronavirus 2 (SARS-CoV-2)
SAVKLQKVG

SEQ ID NO: 2040 - protein, 9 aa, Severe Acute Respiratory Syndrome coronavirus 2 (SARS-CoV-2)
AVKLQKVGG

SEQ ID NO: 2041 - protein, 9 aa, Severe Acute Respiratory Syndrome coronavirus 2 (SARS-CoV-2)
VKLQKVGGN

SEQ ID NO: 2042 - protein, 9 aa, Severe Acute Respiratory Syndrome coronavirus 2 (SARS-CoV-2)
KLQKVGGNY

SEQ ID NO: 2043 - protein, 9 aa, Severe Acute Respiratory Syndrome coronavirus 2 (SARS-CoV-2)
LQKVGGNYN

SEQ ID NO: 2044 - protein, 9 aa, Severe Acute Respiratory Syndrome coronavirus 2 (SARS-CoV-2)
QKVGGNYNY

SEQ ID NO: 2045 - protein, 9 aa, Severe Acute Respiratory Syndrome coronavirus 2 (SARS-CoV-2)
LKPFERDIM

SEQ ID NO: 2046 - protein, 9 aa, Severe Acute Respiratory Syndrome coronavirus 2 (SARS-CoV-2)
KPFERDIMP

SEQ ID NO: 2047 - protein, 9 aa, Severe Acute Respiratory Syndrome coronavirus 2 (SARS-CoV-2)
PFERDIMPN

SEQ ID NO: 2048 - protein, 9 aa, Severe Acute Respiratory Syndrome coronavirus 2 (SARS-CoV-2)
FERDIMPNM

SEQ ID NO: 2049 - protein, 9 aa, Severe Acute Respiratory Syndrome coronavirus 2 (SARS-CoV-2)
ERDIMPNML

SEQ ID NO: 2050 - protein, 9 aa, Severe Acute Respiratory Syndrome coronavirus 2 (SARS-CoV-2)
RDIMPNMLR

SEQ ID NO: 2051 - protein, 9 aa, Severe Acute Respiratory Syndrome coronavirus 2 (SARS-CoV-2)
DIMPNMLRI

SEQ ID NO: 2052 - protein, 9 aa, Severe Acute Respiratory Syndrome coronavirus 2 (SARS-CoV-2)
IMPNMLRIM

SEQ ID NO: 2053 - protein, 9 aa, Severe Acute Respiratory Syndrome coronavirus 2 (SARS-CoV-2)
KYFSGAMDG

SEQ ID NO: 2054 - protein, 9 aa, Severe Acute Respiratory Syndrome coronavirus 2 (SARS-CoV-2)
YFSGAMDGP

SEQ ID NO: 2055 - protein, 9 aa, Severe Acute Respiratory Syndrome coronavirus 2 (SARS-CoV-2)
FSGAMDGPG

SEQ ID NO: 2056 - protein, 9 aa, Severe Acute Respiratory Syndrome coronavirus 2 (SARS-CoV-2)
SGAMDGPGP

SEQ ID NO: 2057 - protein, 9 aa, Severe Acute Respiratory Syndrome coronavirus 2 (SARS-CoV-2)
GAMDGPGPG

SEQ ID NO: 2058 - protein, 9 aa, Severe Acute Respiratory Syndrome coronavirus 2 (SARS-CoV-2)
AMDGPGPGD

SEQ ID NO: 2059 - protein, 9 aa, Severe Acute Respiratory Syndrome coronavirus 2 (SARS-CoV-2)
MDGPGPGDM

SEQ ID NO: 2060 - protein, 9 aa, Severe Acute Respiratory Syndrome coronavirus 2 (SARS-CoV-2)
DGPGPGDMT

SEQ ID NO: 2061 - protein, 9 aa, Severe Acute Respiratory Syndrome coronavirus 2 (SARS-CoV-2)
GPGPGDMTY

SEQ ID NO: 2062 - protein, 9 aa, Severe Acute Respiratory Syndrome coronavirus 2 (SARS-CoV-2)
PGPGDMTYR

SEQ ID NO: 2063 - protein, 9 aa, Severe Acute Respiratory Syndrome coronavirus 2 (SARS-CoV-2)
GPGDMTYRR

SEQ ID NO: 2064 - protein, 9 aa, Severe Acute Respiratory Syndrome coronavirus 2 (SARS-CoV-2)
PGDMTYRRL

SEQ ID NO: 2065 - protein, 9 aa, Severe Acute Respiratory Syndrome coronavirus 2 (SARS-CoV-2)
GDMTYRRLI

SEQ ID NO: 2066 - protein, 9 aa, Severe Acute Respiratory Syndrome coronavirus 2 (SARS-CoV-2)
PWNVVRIKG

SEQ ID NO: 2067 - protein, 9 aa, Severe Acute Respiratory Syndrome coronavirus 2 (SARS-CoV-2)
WNVVRIKGP

SEQ ID NO: 2068 - protein, 9 aa, Severe Acute Respiratory Syndrome coronavirus 2 (SARS-CoV-2)
NVVRIKGPG

SEQ ID NO: 2069 - protein, 9 aa, Severe Acute Respiratory Syndrome coronavirus 2 (SARS-CoV-2)
VVRIKGPGP

SEQ ID NO: 2070 - protein, 9 aa, Severe Acute Respiratory Syndrome coronavirus 2 (SARS-CoV-2)
VRIKGPGPG

SEQ ID NO: 2071 - protein, 9 aa, Severe Acute Respiratory Syndrome coronavirus 2 (SARS-CoV-2)
RIKGPGPGI

SEQ ID NO: 2072 - protein, 9 aa, Severe Acute Respiratory Syndrome coronavirus 2 (SARS-CoV-2)
IKGPGPGIP

SEQ ID NO: 2073 - protein, 9 aa, Severe Acute Respiratory Syndrome coronavirus 2 (SARS-CoV-2)
KGPGPGIPT

SEQ ID NO: 2074 - protein, 9 aa, Severe Acute Respiratory Syndrome coronavirus 2 (SARS-CoV-2)
GPGPGIPTI

SEQ ID NO: 2075 - protein, 9 aa, Severe Acute Respiratory Syndrome coronavirus 2 (SARS-CoV-2)
PGPGIPTIT

SEQ ID NO: 2076 - protein, 9 aa, Severe Acute Respiratory Syndrome coronavirus 2 (SARS-CoV-2)
GPGIPTITQ

SEQ ID NO: 2077 - protein, 9 aa, Severe Acute Respiratory Syndrome coronavirus 2 (SARS-CoV-2)
PGIPTITQM

SEQ ID NO: 2078 - protein, 9 aa, Severe Acute Respiratory Syndrome coronavirus 2 (SARS-CoV-2)
GIPTITQMN

SEQ ID NO: 2079 - protein, 9 aa, Severe Acute Respiratory Syndrome coronavirus 2 (SARS-CoV-2)
NASSSEAFG

SEQ ID NO: 2080 - protein, 9 aa, Severe Acute Respiratory Syndrome coronavirus 2 (SARS-CoV-2)
ASSSEAFGP

SEQ ID NO: 2081 - protein, 9 aa, Severe Acute Respiratory Syndrome coronavirus 2 (SARS-CoV-2)
SSSEAFGPG

SEQ ID NO: 2082 - protein, 9 aa, Severe Acute Respiratory Syndrome coronavirus 2 (SARS-CoV-2)
SSEAFGPGP

SEQ ID NO: 2083 - protein, 9 aa, Severe Acute Respiratory Syndrome coronavirus 2 (SARS-CoV-2)
SEAFGPGPG

SEQ ID NO: 2084 - protein, 9 aa, Severe Acute Respiratory Syndrome coronavirus 2 (SARS-CoV-2)
EAFGPGPGL

SEQ ID NO: 2085 - protein, 9 aa, Severe Acute Respiratory Syndrome coronavirus 2 (SARS-CoV-2)
AFGPGPGLY

SEQ ID NO: 2086 - protein, 9 aa, Severe Acute Respiratory Syndrome coronavirus 2 (SARS-CoV-2)
FGPGPGLYF

SEQ ID NO: 2087 - protein, 9 aa, Severe Acute Respiratory Syndrome coronavirus 2 (SARS-CoV-2)
GPGPGLYFI

SEQ ID NO: 2088 - protein, 9 aa, Severe Acute Respiratory Syndrome coronavirus 2 (SARS-CoV-2)
PGPGLYFIK

SEQ ID NO: 2089 - protein, 9 aa, Severe Acute Respiratory Syndrome coronavirus 2 (SARS-CoV-2)
GPGLYFIKG

SEQ ID NO: 2090 - protein, 9 aa, Severe Acute Respiratory Syndrome coronavirus 2 (SARS-CoV-2)
PGLYFIKGL

SEQ ID NO: 2091 - protein, 9 aa, Severe Acute Respiratory Syndrome coronavirus 2 (SARS-CoV-2)
GLYFIKGLN

SEQ ID NO: 2092 - protein, 9 aa, Severe Acute Respiratory Syndrome coronavirus 2 (SARS-CoV-2)
GLNNLNRGG

SEQ ID NO: 2093 - protein, 9 aa, Severe Acute Respiratory Syndrome coronavirus 2 (SARS-CoV-2)
LNNLNRGGP

SEQ ID NO: 2094 - protein, 9 aa, Severe Acute Respiratory Syndrome coronavirus 2 (SARS-CoV-2)
NNLNRGGPG

SEQ ID NO: 2095 - protein, 9 aa, Severe Acute Respiratory Syndrome coronavirus 2 (SARS-CoV-2)
NLNRGGPGP

SEQ ID NO: 2096 - protein, 9 aa, Severe Acute Respiratory Syndrome coronavirus 2 (SARS-CoV-2)
LNRGGPGPG

SEQ ID NO: 2097 - protein, 9 aa, Severe Acute Respiratory Syndrome coronavirus 2 (SARS-CoV-2)
NRGGPGPGR

SEQ ID NO: 2098 - protein, 9 aa, Severe Acute Respiratory Syndrome coronavirus 2 (SARS-CoV-2)
RGGPGPGRK

SEQ ID NO: 2099 - protein, 9 aa, Severe Acute Respiratory Syndrome coronavirus 2 (SARS-CoV-2)
GGPGPGRKA

SEQ ID NO: 2100 - protein, 9 aa, Severe Acute Respiratory Syndrome coronavirus 2 (SARS-CoV-2)
GPGPGRKAV

SEQ ID NO: 2101 - protein, 9 aa, Severe Acute Respiratory Syndrome coronavirus 2 (SARS-CoV-2)
PGPGRKAVF

SEQ ID NO: 2102 - protein, 9 aa, Severe Acute Respiratory Syndrome coronavirus 2 (SARS-CoV-2)
GPGRKAVFI

SEQ ID NO: 2103 - protein, 9 aa, Severe Acute Respiratory Syndrome coronavirus 2 (SARS-CoV-2)
PGRKAVFIS

SEQ ID NO: 2104 - protein, 9 aa, Severe Acute Respiratory Syndrome coronavirus 2 (SARS-CoV-2)
GRKAVFISP

SEQ ID NO: 2105 - protein, 9 aa, Severe Acute Respiratory Syndrome coronavirus 2 (SARS-CoV-2)
IQPIGALDK

SEQ ID NO: 2106 - protein, 9 aa, Severe Acute Respiratory Syndrome coronavirus 2 (SARS-CoV-2)
QPIGALDKG

SEQ ID NO: 2107 - protein, 9 aa, Severe Acute Respiratory Syndrome coronavirus 2 (SARS-CoV-2)
PIGALDKGR

SEQ ID NO: 2108 - protein, 9 aa, Severe Acute Respiratory Syndrome coronavirus 2 (SARS-CoV-2)
IGALDKGRL

SEQ ID NO: 2109 - protein, 9 aa, Severe Acute Respiratory Syndrome coronavirus 2 (SARS-CoV-2)
GALDKGRLI

SEQ ID NO: 2110 - protein, 9 aa, Severe Acute Respiratory Syndrome coronavirus 2 (SARS-CoV-2)
ALDKGRLII

SEQ ID NO: 2111 - protein, 9 aa, Severe Acute Respiratory Syndrome coronavirus 2 (SARS-CoV-2)
LDKGRLIIR

SEQ ID NO: 2112 - protein, 9 aa, Severe Acute Respiratory Syndrome coronavirus 2 (SARS-CoV-2)
DKGRLIIRE

SEQ ID NO: 2113 - protein, 9 aa, Severe Acute Respiratory Syndrome coronavirus 2 (SARS-CoV-2)
NNRVVISSG

SEQ ID NO: 2114 - protein, 9 aa, Severe Acute Respiratory Syndrome coronavirus 2 (SARS-CoV-2)
NRVVISSGP

SEQ ID NO: 2115 - protein, 9 aa, Severe Acute Respiratory Syndrome coronavirus 2 (SARS-CoV-2)
RVVISSGPG

SEQ ID NO: 2116 - protein, 9 aa, Severe Acute Respiratory Syndrome coronavirus 2 (SARS-CoV-2)
VVISSGPGP

SEQ ID NO: 2117 - protein, 9 aa, Severe Acute Respiratory Syndrome coronavirus 2 (SARS-CoV-2)
VISSGPGPG

SEQ ID NO: 2118 - protein, 9 aa, Severe Acute Respiratory Syndrome coronavirus 2 (SARS-CoV-2)
ISSGPGPGT

SEQ ID NO: 2119 - protein, 9 aa, Severe Acute Respiratory Syndrome coronavirus 2 (SARS-CoV-2)
SSGPGPGTE

SEQ ID NO: 2120 - protein, 9 aa, Severe Acute Respiratory Syndrome coronavirus 2 (SARS-CoV-2)
SGPGPGTER

SEQ ID NO: 2121 - protein, 9 aa, Severe Acute Respiratory Syndrome coronavirus 2 (SARS-CoV-2)
GPGPGTERL

SEQ ID NO: 2122 - protein, 9 aa, Severe Acute Respiratory Syndrome coronavirus 2 (SARS-CoV-2)
PGPGTERLK

SEQ ID NO: 2123 - protein, 9 aa, Severe Acute Respiratory Syndrome coronavirus 2 (SARS-CoV-2)
GPGTERLKL

SEQ ID NO: 2124 - protein, 9 aa, Severe Acute Respiratory Syndrome coronavirus 2 (SARS-CoV-2)
PGTERLKLF

SEQ ID NO: 2125 - protein, 9 aa, Severe Acute Respiratory Syndrome coronavirus 2 (SARS-CoV-2)
GTERLKLFA

SEQ ID NO: 2126 - protein, 9 aa, Severe Acute Respiratory Syndrome coronavirus 2 (SARS-CoV-2)
KVGILSIMG

SEQ ID NO: 2127 - protein, 9 aa, Severe Acute Respiratory Syndrome coronavirus 2 (SARS-CoV-2)
VGILSIMGP

SEQ ID NO: 2128 - protein, 9 aa, Severe Acute Respiratory Syndrome coronavirus 2 (SARS-CoV-2)
GILSIMGPG

SEQ ID NO: 2129 - protein, 9 aa, Severe Acute Respiratory Syndrome coronavirus 2 (SARS-CoV-2)
ILSIMGPGP

SEQ ID NO: 2130 - protein, 9 aa, Severe Acute Respiratory Syndrome coronavirus 2 (SARS-CoV-2)
LSIMGPGPG

SEQ ID NO: 2131 - protein, 9 aa, Severe Acute Respiratory Syndrome coronavirus 2 (SARS-CoV-2)
SIMGPGPGG

SEQ ID NO: 2132 - protein, 9 aa, Severe Acute Respiratory Syndrome coronavirus 2 (SARS-CoV-2)
IMGPGPGGS

SEQ ID NO: 2133 - protein, 9 aa, Severe Acute Respiratory Syndrome coronavirus 2 (SARS-CoV-2)
MGPGPGGSL

SEQ ID NO: 2134 - protein, 9 aa, Severe Acute Respiratory Syndrome coronavirus 2 (SARS-CoV-2)
GPGPGGSLY

SEQ ID NO: 2135 - protein, 9 aa, Severe Acute Respiratory Syndrome coronavirus 2 (SARS-CoV-2)
PGPGGSLYV

SEQ ID NO: 2136 - protein, 9 aa, Severe Acute Respiratory Syndrome coronavirus 2 (SARS-CoV-2)
GPGGSLYVN

SEQ ID NO: 2137 - protein, 9 aa, Severe Acute Respiratory Syndrome coronavirus 2 (SARS-CoV-2)
PGGSLYVNK

SEQ ID NO: 2138 - protein, 9 aa, Severe Acute Respiratory Syndrome coronavirus 2 (SARS-CoV-2)
AFHTPAFDT

SEQ ID NO: 2139 - protein, 9 aa, Severe Acute Respiratory Syndrome coronavirus 2 (SARS-CoV-2)
FHTPAFDTQ

SEQ ID NO: 2140 - protein, 9 aa, Severe Acute Respiratory Syndrome coronavirus 2 (SARS-CoV-2)
HTPAFDTQS

SEQ ID NO: 2141 - protein, 9 aa, Severe Acute Respiratory Syndrome coronavirus 2 (SARS-CoV-2)
TPAFDTQSL

SEQ ID NO: 2142 - protein, 9 aa, Severe Acute Respiratory Syndrome coronavirus 2 (SARS-CoV-2)
PAFDTQSLL

SEQ ID NO: 2143 - protein, 9 aa, Severe Acute Respiratory Syndrome coronavirus 2 (SARS-CoV-2)
AFDTQSLLI

SEQ ID NO: 2144 - protein, 9 aa, Severe Acute Respiratory Syndrome coronavirus 2 (SARS-CoV-2)
FDTQSLLIV

SEQ ID NO: 2145 - protein, 9 aa, Severe Acute Respiratory Syndrome coronavirus 2 (SARS-CoV-2)
DTQSLLIVN

SEQ ID NO: 2146 - protein, 9 aa, Severe Acute Respiratory Syndrome coronavirus 2 (SARS-CoV-2)
NTKGSLPIG

SEQ ID NO: 2147 - protein, 9 aa, Severe Acute Respiratory Syndrome coronavirus 2 (SARS-CoV-2)
TKGSLPIGP

SEQ ID NO: 2148 - protein, 9 aa, Severe Acute Respiratory Syndrome coronavirus 2 (SARS-CoV-2)
KGSLPIGPG

SEQ ID NO: 2149 - protein, 9 aa, Severe Acute Respiratory Syndrome coronavirus 2 (SARS-CoV-2)
GSLPIGPGP

SEQ ID NO: 2150 - protein, 9 aa, Severe Acute Respiratory Syndrome coronavirus 2 (SARS-CoV-2)
SLPIGPGPG

SEQ ID NO: 2151 - protein, 9 aa, Severe Acute Respiratory Syndrome coronavirus 2 (SARS-CoV-2)
LPIGPGPGY

SEQ ID NO: 2152 - protein, 9 aa, Severe Acute Respiratory Syndrome coronavirus 2 (SARS-CoV-2)
PIGPGPGYE

SEQ ID NO: 2153 - protein, 9 aa, Severe Acute Respiratory Syndrome coronavirus 2 (SARS-CoV-2)
IGPGPGYED

SEQ ID NO: 2154 - protein, 9 aa, Severe Acute Respiratory Syndrome coronavirus 2 (SARS-CoV-2)
GPGPGYEDL

SEQ ID NO: 2155 - protein, 9 aa, Severe Acute Respiratory Syndrome coronavirus 2 (SARS-CoV-2)
PGPGYEDLL

SEQ ID NO: 2156 - protein, 9 aa, Severe Acute Respiratory Syndrome coronavirus 2 (SARS-CoV-2)
GPGYEDLLI

SEQ ID NO: 2157 - protein, 9 aa, Severe Acute Respiratory Syndrome coronavirus 2 (SARS-CoV-2)
PGYEDLLIR

SEQ ID NO: 2158 - protein, 9 aa, Severe Acute Respiratory Syndrome coronavirus 2 (SARS-CoV-2)
GYEDLLIRK

SEQ ID NO: 2159 - protein, 10 aa, Severe Acute Respiratory Syndrome coronavirus 2 (SARS-CoV-2)
ANYIFWRNTN

SEQ ID NO: 2160 - protein, 10 aa, Severe Acute Respiratory Syndrome coronavirus 2 (SARS-CoV-2)
NYIFWRNTNP

SEQ ID NO: 2161 - protein, 10 aa, Severe Acute Respiratory Syndrome coronavirus 2 (SARS-CoV-2)
YIFWRNTNPI

SEQ ID NO: 2162 - protein, 10 aa, Severe Acute Respiratory Syndrome coronavirus 2 (SARS-CoV-2)
IFWRNTNPIQ

SEQ ID NO: 2163 - protein, 10 aa, Severe Acute Respiratory Syndrome coronavirus 2 (SARS-CoV-2)
FWRNTNPIQL

SEQ ID NO: 2164 - protein, 10 aa, Severe Acute Respiratory Syndrome coronavirus 2 (SARS-CoV-2)
WRNTNPIQLS

SEQ ID NO: 2165 - protein, 10 aa, Severe Acute Respiratory Syndrome coronavirus 2 (SARS-CoV-2)
RNTNPIQLSS

SEQ ID NO: 2166 - protein, 10 aa, Severe Acute Respiratory Syndrome coronavirus 2 (SARS-CoV-2)
NTNPIQLSSY

SEQ ID NO: 2167 - protein, 10 aa, Severe Acute Respiratory Syndrome coronavirus 2 (SARS-CoV-2)
TNPIQLSSYG

SEQ ID NO: 2168 - protein, 10 aa, Severe Acute Respiratory Syndrome coronavirus 2 (SARS-CoV-2)
NPIQLSSYGP

SEQ ID NO: 2169 - protein, 10 aa, Severe Acute Respiratory Syndrome coronavirus 2 (SARS-CoV-2)
PIQLSSYGPG

SEQ ID NO: 2170 - protein, 10 aa, Severe Acute Respiratory Syndrome coronavirus 2 (SARS-CoV-2)
IQLSSYGPGP

SEQ ID NO: 2171 - protein, 10 aa, Severe Acute Respiratory Syndrome coronavirus 2 (SARS-CoV-2)
QLSSYGPGPG

SEQ ID NO: 2172 - protein, 10 aa, Severe Acute Respiratory Syndrome coronavirus 2 (SARS-CoV-2)
LSSYGPGPGD

SEQ ID NO: 2173 - protein, 10 aa, Severe Acute Respiratory Syndrome coronavirus 2 (SARS-CoV-2)
SSYGPGPGDV

SEQ ID NO: 2174 - protein, 10 aa, Severe Acute Respiratory Syndrome coronavirus 2 (SARS-CoV-2)
SYGPGPGDVD

SEQ ID NO: 2175 - protein, 10 aa, Severe Acute Respiratory Syndrome coronavirus 2 (SARS-CoV-2)
YGPGPGDVDT

SEQ ID NO: 2176 - protein, 10 aa, Severe Acute Respiratory Syndrome coronavirus 2 (SARS-CoV-2)
GPGPGDVDTD

SEQ ID NO: 2177 - protein, 10 aa, Severe Acute Respiratory Syndrome coronavirus 2 (SARS-CoV-2)
PGPGDVDTDF

SEQ ID NO: 2178 - protein, 10 aa, Severe Acute Respiratory Syndrome coronavirus 2 (SARS-CoV-2)
GPGDVDTDFV

SEQ ID NO: 2179 - protein, 10 aa, Severe Acute Respiratory Syndrome coronavirus 2 (SARS-CoV-2)
PGDVDTDFVN

SEQ ID NO: 2180 - protein, 10 aa, Severe Acute Respiratory Syndrome coronavirus 2 (SARS-CoV-2)
GDVDTDFVNE

SEQ ID NO: 2181 - protein, 10 aa, Severe Acute Respiratory Syndrome coronavirus 2 (SARS-CoV-2)
DVDTDFVNEF

SEQ ID NO: 2182 - protein, 10 aa, Severe Acute Respiratory Syndrome coronavirus 2 (SARS-CoV-2)
VDTDFVNEFY

SEQ ID NO: 2183 - protein, 10 aa, Severe Acute Respiratory Syndrome coronavirus 2 (SARS-CoV-2)
DTDFVNEFYA

SEQ ID NO: 2184 - protein, 10 aa, Severe Acute Respiratory Syndrome coronavirus 2 (SARS-CoV-2)
TDFVNEFYAY

SEQ ID NO: 2185 - protein, 10 aa, Severe Acute Respiratory Syndrome coronavirus 2 (SARS-CoV-2)
DFVNEFYAYL

SEQ ID NO: 2186 - protein, 10 aa, Severe Acute Respiratory Syndrome coronavirus 2 (SARS-CoV-2)
FVNEFYAYLR

SEQ ID NO: 2187 - protein, 10 aa, Severe Acute Respiratory Syndrome coronavirus 2 (SARS-CoV-2)
VNEFYAYLRK

SEQ ID NO: 2188 - protein, 10 aa, Severe Acute Respiratory Syndrome coronavirus 2 (SARS-CoV-2)
NEFYAYLRKH

SEQ ID NO: 2189 - protein, 10 aa, Severe Acute Respiratory Syndrome coronavirus 2 (SARS-CoV-2)
EFYAYLRKHF

SEQ ID NO: 2190 - protein, 10 aa, Severe Acute Respiratory Syndrome coronavirus 2 (SARS-CoV-2)
FYAYLRKHFS

SEQ ID NO: 2191 - protein, 10 aa, Severe Acute Respiratory Syndrome coronavirus 2 (SARS-CoV-2)
YAYLRKHFSM

SEQ ID NO: 2192 - protein, 10 aa, Severe Acute Respiratory Syndrome coronavirus 2 (SARS-CoV-2)
AYLRKHFSMM

SEQ ID NO: 2193 - protein, 10 aa, Severe Acute Respiratory Syndrome coronavirus 2 (SARS-CoV-2)
YLRKHFSMMI

SEQ ID NO: 2194 - protein, 10 aa, Severe Acute Respiratory Syndrome coronavirus 2 (SARS-CoV-2)
LRKHFSMMIL

SEQ ID NO: 2195 - protein, 10 aa, Severe Acute Respiratory Syndrome coronavirus 2 (SARS-CoV-2)
RKHFSMMILS

SEQ ID NO: 2196 - protein, 10 aa, Severe Acute Respiratory Syndrome coronavirus 2 (SARS-CoV-2)
KHFSMMILSD

SEQ ID NO: 2197 - protein, 10 aa, Severe Acute Respiratory Syndrome coronavirus 2 (SARS-CoV-2)
ISMWALIISV

SEQ ID NO: 2198 - protein, 10 aa, Severe Acute Respiratory Syndrome coronavirus 2 (SARS-CoV-2)
SMWALIISVT

SEQ ID NO: 2199 - protein, 10 aa, Severe Acute Respiratory Syndrome coronavirus 2 (SARS-CoV-2)
MWALIISVTS

SEQ ID NO: 2200 - protein, 10 aa, Severe Acute Respiratory Syndrome coronavirus 2 (SARS-CoV-2)
WALIISVTSN

SEQ ID NO: 2201 - protein, 10 aa, Severe Acute Respiratory Syndrome coronavirus 2 (SARS-CoV-2)
ALIISVTSNY

SEQ ID NO: 2202 - protein, 10 aa, Severe Acute Respiratory Syndrome coronavirus 2 (SARS-CoV-2)
LIISVTSNYS

SEQ ID NO: 2203 - protein, 10 aa, Severe Acute Respiratory Syndrome coronavirus 2 (SARS-CoV-2)
IISVTSNYSG

SEQ ID NO: 2204 - protein, 10 aa, Severe Acute Respiratory Syndrome coronavirus 2 (SARS-CoV-2)
ISVTSNYSGV

SEQ ID NO: 2205 - protein, 10 aa, Severe Acute Respiratory Syndrome coronavirus 2 (SARS-CoV-2)
SVTSNYSGVV

SEQ ID NO: 2206 - protein, 10 aa, Severe Acute Respiratory Syndrome coronavirus 2 (SARS-CoV-2)
VTSNYSGVVT

SEQ ID NO: 2207 - protein, 10 aa, Severe Acute Respiratory Syndrome coronavirus 2 (SARS-CoV-2)
TSNYSGVVTT

SEQ ID NO: 2208 - protein, 10 aa, Severe Acute Respiratory Syndrome coronavirus 2 (SARS-CoV-2)
SNYSGVVTTV

SEQ ID NO: 2209 - protein, 10 aa, Severe Acute Respiratory Syndrome coronavirus 2 (SARS-CoV-2)
NYSGVVTTVG

SEQ ID NO: 2210 - protein, 10 aa, Severe Acute Respiratory Syndrome coronavirus 2 (SARS-CoV-2)
YSGVVTTVGP

SEQ ID NO: 2211 - protein, 10 aa, Severe Acute Respiratory Syndrome coronavirus 2 (SARS-CoV-2)
SGVVTTVGPG

SEQ ID NO: 2212 - protein, 10 aa, Severe Acute Respiratory Syndrome coronavirus 2 (SARS-CoV-2)
GVVTTVGPGP

SEQ ID NO: 2213 - protein, 10 aa, Severe Acute Respiratory Syndrome coronavirus 2 (SARS-CoV-2)
VVTTVGPGPG

SEQ ID NO: 2214 - protein, 10 aa, Severe Acute Respiratory Syndrome coronavirus 2 (SARS-CoV-2)
VTTVGPGPGV

SEQ ID NO: 2215 - protein, 10 aa, Severe Acute Respiratory Syndrome coronavirus 2 (SARS-CoV-2)
TTVGPGPGVA

SEQ ID NO: 2216 - protein, 10 aa, Severe Acute Respiratory Syndrome coronavirus 2 (SARS-CoV-2)
TVGPGPGVAS

SEQ ID NO: 2217 - protein, 10 aa, Severe Acute Respiratory Syndrome coronavirus 2 (SARS-CoV-2)
VGPGPGVASI

SEQ ID NO: 2218 - protein, 10 aa, Severe Acute Respiratory Syndrome coronavirus 2 (SARS-CoV-2)
GPGPGVASIK

SEQ ID NO: 2219 - protein, 10 aa, Severe Acute Respiratory Syndrome coronavirus 2 (SARS-CoV-2)
PGPGVASIKN

SEQ ID NO: 2220 - protein, 10 aa, Severe Acute Respiratory Syndrome coronavirus 2 (SARS-CoV-2)
GPGVASIKNF

SEQ ID NO: 2221 - protein, 10 aa, Severe Acute Respiratory Syndrome coronavirus 2 (SARS-CoV-2)
PGVASIKNFK

SEQ ID NO: 2222 - protein, 10 aa, Severe Acute Respiratory Syndrome coronavirus 2 (SARS-CoV-2)
GVASIKNFKS

SEQ ID NO: 2223 - protein, 10 aa, Severe Acute Respiratory Syndrome coronavirus 2 (SARS-CoV-2)
VASIKNFKSV

SEQ ID NO: 2224 - protein, 10 aa, Severe Acute Respiratory Syndrome coronavirus 2 (SARS-CoV-2)
ASIKNFKSVL

SEQ ID NO: 2225 - protein, 10 aa, Severe Acute Respiratory Syndrome coronavirus 2 (SARS-CoV-2)
SIKNFKSVLY

SEQ ID NO: 2226 - protein, 10 aa, Severe Acute Respiratory Syndrome coronavirus 2 (SARS-CoV-2)
IKNFKSVLYY

SEQ ID NO: 2227 - protein, 10 aa, Severe Acute Respiratory Syndrome coronavirus 2 (SARS-CoV-2)
KNFKSVLYYQ

SEQ ID NO: 2228 - protein, 10 aa, Severe Acute Respiratory Syndrome coronavirus 2 (SARS-CoV-2)
NFKSVLYYQN

SEQ ID NO: 2229 - protein, 10 aa, Severe Acute Respiratory Syndrome coronavirus 2 (SARS-CoV-2)
FKSVLYYQNN

SEQ ID NO: 2230 - protein, 10 aa, Severe Acute Respiratory Syndrome coronavirus 2 (SARS-CoV-2)
KSVLYYQNNV

SEQ ID NO: 2231 - protein, 10 aa, Severe Acute Respiratory Syndrome coronavirus 2 (SARS-CoV-2)
SVLYYQNNVF

SEQ ID NO: 2232 - protein, 10 aa, Severe Acute Respiratory Syndrome coronavirus 2 (SARS-CoV-2)
VLYYQNNVFM

SEQ ID NO: 2233 - protein, 10 aa, Severe Acute Respiratory Syndrome coronavirus 2 (SARS-CoV-2)
LYYQNNVFMS

SEQ ID NO: 2234 - protein, 10 aa, Severe Acute Respiratory Syndrome coronavirus 2 (SARS-CoV-2)
YYQNNVFMSE

SEQ ID NO: 2235 - protein, 10 aa, Severe Acute Respiratory Syndrome coronavirus 2 (SARS-CoV-2)
YQNNVFMSEA

SEQ ID NO: 2236 - protein, 10 aa, Severe Acute Respiratory Syndrome coronavirus 2 (SARS-CoV-2)
QNNVFMSEAK

SEQ ID NO: 2237 - protein, 10 aa, Severe Acute Respiratory Syndrome coronavirus 2 (SARS-CoV-2)
WPLIVTALRA

SEQ ID NO: 2238 - protein, 10 aa, Severe Acute Respiratory Syndrome coronavirus 2 (SARS-CoV-2)
PLIVTALRAN

SEQ ID NO: 2239 - protein, 10 aa, Severe Acute Respiratory Syndrome coronavirus 2 (SARS-CoV-2)
LIVTALRANS

SEQ ID NO: 2240 - protein, 10 aa, Severe Acute Respiratory Syndrome coronavirus 2 (SARS-CoV-2)
IVTALRANSA

SEQ ID NO: 2241 - protein, 10 aa, Severe Acute Respiratory Syndrome coronavirus 2 (SARS-CoV-2)
VTALRANSAV

SEQ ID NO: 2242 - protein, 10 aa, Severe Acute Respiratory Syndrome coronavirus 2 (SARS-CoV-2)
TALRANSAVK

SEQ ID NO: 2243 - protein, 10 aa, Severe Acute Respiratory Syndrome coronavirus 2 (SARS-CoV-2)
ALRANSAVKL

SEQ ID NO: 2244 - protein, 10 aa, Severe Acute Respiratory Syndrome coronavirus 2 (SARS-CoV-2)
LRANSAVKLQ

SEQ ID NO: 2245 - protein, 10 aa, Severe Acute Respiratory Syndrome coronavirus 2 (SARS-CoV-2)
RANSAVKLQK

SEQ ID NO: 2246 - protein, 10 aa, Severe Acute Respiratory Syndrome coronavirus 2 (SARS-CoV-2)
ANSAVKLQKV

SEQ ID NO: 2247 - protein, 10 aa, Severe Acute Respiratory Syndrome coronavirus 2 (SARS-CoV-2)
NSAVKLQKVG

SEQ ID NO: 2248 - protein, 10 aa, Severe Acute Respiratory Syndrome coronavirus 2 (SARS-CoV-2)
SAVKLQKVGG

SEQ ID NO: 2249 - protein, 10 aa, Severe Acute Respiratory Syndrome coronavirus 2 (SARS-CoV-2)
AVKLQKVGGN

SEQ ID NO: 2250 - protein, 10 aa, Severe Acute Respiratory Syndrome coronavirus 2 (SARS-CoV-2)
VKLQKVGGNY

SEQ ID NO: 2251 - protein, 10 aa, Severe Acute Respiratory Syndrome coronavirus 2 (SARS-CoV-2)
KLQKVGGNYN

SEQ ID NO: 2252 - protein, 10 aa, Severe Acute Respiratory Syndrome coronavirus 2 (SARS-CoV-2)
LQKVGGNYNY

SEQ ID NO: 2253 - protein, 10 aa, Severe Acute Respiratory Syndrome coronavirus 2 (SARS-CoV-2)
QKVGGNYNYL

SEQ ID NO: 2254 - protein, 10 aa, Severe Acute Respiratory Syndrome coronavirus 2 (SARS-CoV-2)
KVGGNYNYLY

SEQ ID NO: 2255 - protein, 9 aa, Severe Acute Respiratory Syndrome coronavirus 2 (SARS-CoV-2)
LNTDHSSSS

SEQ ID NO: 2256 - protein, 10 aa, Severe Acute Respiratory Syndrome coronavirus 2 (SARS-CoV-2)
VGGNYNYLYR

SEQ ID NO: 2257 - protein, 10 aa, Severe Acute Respiratory Syndrome coronavirus 2 (SARS-CoV-2)
GGNYNYLYRL

SEQ ID NO: 2258 - protein, 10 aa, Severe Acute Respiratory Syndrome coronavirus 2 (SARS-CoV-2)
GNYNYLYRLF

SEQ ID NO: 2259 - protein, 10 aa, Severe Acute Respiratory Syndrome coronavirus 2 (SARS-CoV-2)
NYNYLYRLFR

SEQ ID NO: 2260 - protein, 10 aa, Severe Acute Respiratory Syndrome coronavirus 2 (SARS-CoV-2)
YNYLYRLFRK

SEQ ID NO: 2261 - protein, 10 aa, Severe Acute Respiratory Syndrome coronavirus 2 (SARS-CoV-2)
NYLYRLFRKS

SEQ ID NO: 2262 - protein, 10 aa, Severe Acute Respiratory Syndrome coronavirus 2 (SARS-CoV-2)
YLYRLFRKSN

SEQ ID NO: 2263 - protein, 10 aa, Severe Acute Respiratory Syndrome coronavirus 2 (SARS-CoV-2)
LYRLFRKSNL

SEQ ID NO: 2264 - protein, 10 aa, Severe Acute Respiratory Syndrome coronavirus 2 (SARS-CoV-2)
YRLFRKSNLK

SEQ ID NO: 2265 - protein, 10 aa, Severe Acute Respiratory Syndrome coronavirus 2 (SARS-CoV-2)
RLFRKSNLKP

SEQ ID NO: 2266 - protein, 10 aa, Severe Acute Respiratory Syndrome coronavirus 2 (SARS-CoV-2)
LFRKSNLKPF

SEQ ID NO: 2267 - protein, 10 aa, Severe Acute Respiratory Syndrome coronavirus 2 (SARS-CoV-2)
FRKSNLKPFE

SEQ ID NO: 2268 - protein, 10 aa, Severe Acute Respiratory Syndrome coronavirus 2 (SARS-CoV-2)
RKSNLKPFER

SEQ ID NO: 2269 - protein, 10 aa, Severe Acute Respiratory Syndrome coronavirus 2 (SARS-CoV-2)
KSNLKPFERD

SEQ ID NO: 2270 - protein, 10 aa, Severe Acute Respiratory Syndrome coronavirus 2 (SARS-CoV-2)
SNLKPFERDI

SEQ ID NO: 2271 - protein, 10 aa, Severe Acute Respiratory Syndrome coronavirus 2 (SARS-CoV-2)
NLKPFERDIM

SEQ ID NO: 2272 - protein, 10 aa, Severe Acute Respiratory Syndrome coronavirus 2 (SARS-CoV-2)
LKPFERDIMP

SEQ ID NO: 2273 - protein, 10 aa, Severe Acute Respiratory Syndrome coronavirus 2 (SARS-CoV-2)
KPFERDIMPN

SEQ ID NO: 2274 - protein, 10 aa, Severe Acute Respiratory Syndrome coronavirus 2 (SARS-CoV-2)
PFERDIMPNM

SEQ ID NO: 2275 - protein, 10 aa, Severe Acute Respiratory Syndrome coronavirus 2 (SARS-CoV-2)
FERDIMPNML

SEQ ID NO: 2276 - protein, 10 aa, Severe Acute Respiratory Syndrome coronavirus 2 (SARS-CoV-2)
ERDIMPNMLR

SEQ ID NO: 2277 - protein, 10 aa, Severe Acute Respiratory Syndrome coronavirus 2 (SARS-CoV-2)
RDIMPNMLRI

SEQ ID NO: 2278 - protein, 10 aa, Severe Acute Respiratory Syndrome coronavirus 2 (SARS-CoV-2)
DIMPNMLRIM

SEQ ID NO: 2279 - protein, 10 aa, Severe Acute Respiratory Syndrome coronavirus 2 (SARS-CoV-2)
IMPNMLRIMA

SEQ ID NO: 2280 - protein, 10 aa, Severe Acute Respiratory Syndrome coronavirus 2 (SARS-CoV-2)
MPNMLRIMAS

SEQ ID NO: 2281 - protein, 10 aa, Severe Acute Respiratory Syndrome coronavirus 2 (SARS-CoV-2)
PNMLRIMASL

SEQ ID NO: 2282 - protein, 10 aa, Severe Acute Respiratory Syndrome coronavirus 2 (SARS-CoV-2)
NMLRIMASLV

SEQ ID NO: 2283 - protein, 10 aa, Severe Acute Respiratory Syndrome coronavirus 2 (SARS-CoV-2)
MLRIMASLVL

SEQ ID NO: 2284 - protein, 10 aa, Severe Acute Respiratory Syndrome coronavirus 2 (SARS-CoV-2)
LRIMASLVLA

SEQ ID NO: 2285 - protein, 10 aa, Severe Acute Respiratory Syndrome coronavirus 2 (SARS-CoV-2)
RIMASLVLAR

SEQ ID NO: 2286 - protein, 10 aa, Severe Acute Respiratory Syndrome coronavirus 2 (SARS-CoV-2)
IMASLVLARK

SEQ ID NO: 2287 - protein, 10 aa, Severe Acute Respiratory Syndrome coronavirus 2 (SARS-CoV-2)
MASLVLARKH

SEQ ID NO: 2288 - protein, 10 aa, Severe Acute Respiratory Syndrome coronavirus 2 (SARS-CoV-2)
ASLVLARKHT

SEQ ID NO: 2289 - protein, 10 aa, Severe Acute Respiratory Syndrome coronavirus 2 (SARS-CoV-2)
LLPLTQYNRY

SEQ ID NO: 2290 - protein, 10 aa, Severe Acute Respiratory Syndrome coronavirus 2 (SARS-CoV-2)
LPLTQYNRYL

SEQ ID NO: 2291 - protein, 10 aa, Severe Acute Respiratory Syndrome coronavirus 2 (SARS-CoV-2)
PLTQYNRYLA

SEQ ID NO: 2292 - protein, 10 aa, Severe Acute Respiratory Syndrome coronavirus 2 (SARS-CoV-2)
LTQYNRYLAL

SEQ ID NO: 2293 - protein, 10 aa, Severe Acute Respiratory Syndrome coronavirus 2 (SARS-CoV-2)
TQYNRYLALY

SEQ ID NO: 2294 - protein, 10 aa, Severe Acute Respiratory Syndrome coronavirus 2 (SARS-CoV-2)
QYNRYLALYN

SEQ ID NO: 2295 - protein, 10 aa, Severe Acute Respiratory Syndrome coronavirus 2 (SARS-CoV-2)
YNRYLALYNK

SEQ ID NO: 2296 - protein, 10 aa, Severe Acute Respiratory Syndrome coronavirus 2 (SARS-CoV-2)
NRYLALYNKY

SEQ ID NO: 2297 - protein, 10 aa, Severe Acute Respiratory Syndrome coronavirus 2 (SARS-CoV-2)
RYLALYNKYK

SEQ ID NO: 2298 - protein, 10 aa, Severe Acute Respiratory Syndrome coronavirus 2 (SARS-CoV-2)
YLALYNKYKY

SEQ ID NO: 2299 - protein, 10 aa, Severe Acute Respiratory Syndrome coronavirus 2 (SARS-CoV-2)
LALYNKYKYF

SEQ ID NO: 2300 - protein, 10 aa, Severe Acute Respiratory Syndrome coronavirus 2 (SARS-CoV-2)
ALYNKYKYFS

SEQ ID NO: 2301 - protein, 10 aa, Severe Acute Respiratory Syndrome coronavirus 2 (SARS-CoV-2)
LYNKYKYFSG

SEQ ID NO: 2302 - protein, 10 aa, Severe Acute Respiratory Syndrome coronavirus 2 (SARS-CoV-2)
YNKYKYFSGA

SEQ ID NO: 2303 - protein, 10 aa, Severe Acute Respiratory Syndrome coronavirus 2 (SARS-CoV-2)
NKYKYFSGAM

SEQ ID NO: 2304 - protein, 10 aa, Severe Acute Respiratory Syndrome coronavirus 2 (SARS-CoV-2)
KYKYFSGAMD

SEQ ID NO: 2305 - protein, 10 aa, Severe Acute Respiratory Syndrome coronavirus 2 (SARS-CoV-2)
YKYFSGAMDG

SEQ ID NO: 2306 - protein, 10 aa, Severe Acute Respiratory Syndrome coronavirus 2 (SARS-CoV-2)
KYFSGAMDGP

SEQ ID NO: 2307 - protein, 10 aa, Severe Acute Respiratory Syndrome coronavirus 2 (SARS-CoV-2)
YFSGAMDGPG

SEQ ID NO: 2308 - protein, 10 aa, Severe Acute Respiratory Syndrome coronavirus 2 (SARS-CoV-2)
FSGAMDGPGP

SEQ ID NO: 2309 - protein, 10 aa, Severe Acute Respiratory Syndrome coronavirus 2 (SARS-CoV-2)
SGAMDGPGPG

SEQ ID NO: 2310 - protein, 10 aa, Severe Acute Respiratory Syndrome coronavirus 2 (SARS-CoV-2)
GAMDGPGPGD

SEQ ID NO: 2311 - protein, 10 aa, Severe Acute Respiratory Syndrome coronavirus 2 (SARS-CoV-2)
AMDGPGPGDM

SEQ ID NO: 2312 - protein, 10 aa, Severe Acute Respiratory Syndrome coronavirus 2 (SARS-CoV-2)
MDGPGPGDMT

SEQ ID NO: 2313 - protein, 10 aa, Severe Acute Respiratory Syndrome coronavirus 2 (SARS-CoV-2)
DGPGPGDMTY

SEQ ID NO: 2314 - protein, 10 aa, Severe Acute Respiratory Syndrome coronavirus 2 (SARS-CoV-2)
GPGPGDMTYR

SEQ ID NO: 2315 - protein, 10 aa, Severe Acute Respiratory Syndrome coronavirus 2 (SARS-CoV-2)
PGPGDMTYRR

SEQ ID NO: 2316 - protein, 10 aa, Severe Acute Respiratory Syndrome coronavirus 2 (SARS-CoV-2)
GPGDMTYRRL

SEQ ID NO: 2317 - protein, 10 aa, Severe Acute Respiratory Syndrome coronavirus 2 (SARS-CoV-2)
PGDMTYRRLI

SEQ ID NO: 2318 - protein, 10 aa, Severe Acute Respiratory Syndrome coronavirus 2 (SARS-CoV-2)
GDMTYRRLIS

SEQ ID NO: 2319 - protein, 10 aa, Severe Acute Respiratory Syndrome coronavirus 2 (SARS-CoV-2)
DMTYRRLISM

SEQ ID NO: 2320 - protein, 10 aa, Severe Acute Respiratory Syndrome coronavirus 2 (SARS-CoV-2)
MTYRRLISMM

SEQ ID NO: 2321 - protein, 10 aa, Severe Acute Respiratory Syndrome coronavirus 2 (SARS-CoV-2)
TYRRLISMMG

SEQ ID NO: 2322 - protein, 10 aa, Severe Acute Respiratory Syndrome coronavirus 2 (SARS-CoV-2)
YRRLISMMGF

SEQ ID NO: 2323 - protein, 10 aa, Severe Acute Respiratory Syndrome coronavirus 2 (SARS-CoV-2)
RRLISMMGFK

SEQ ID NO: 2324 - protein, 10 aa, Severe Acute Respiratory Syndrome coronavirus 2 (SARS-CoV-2)
RLISMMGFKM

SEQ ID NO: 2325 - protein, 10 aa, Severe Acute Respiratory Syndrome coronavirus 2 (SARS-CoV-2)
LISMMGFKMN

SEQ ID NO: 2326 - protein, 10 aa, Severe Acute Respiratory Syndrome coronavirus 2 (SARS-CoV-2)
ISMMGFKMNY

SEQ ID NO: 2327 - protein, 10 aa, Severe Acute Respiratory Syndrome coronavirus 2 (SARS-CoV-2)
SMMGFKMNYQ

SEQ ID NO: 2328 - protein, 10 aa, Severe Acute Respiratory Syndrome coronavirus 2 (SARS-CoV-2)
MMGFKMNYQV

SEQ ID NO: 2329 - protein, 10 aa, Severe Acute Respiratory Syndrome coronavirus 2 (SARS-CoV-2)
GDQFKHLIPL

SEQ ID NO: 2330 - protein, 10 aa, Severe Acute Respiratory Syndrome coronavirus 2 (SARS-CoV-2)
DQFKHLIPLM

SEQ ID NO: 2331 - protein, 10 aa, Severe Acute Respiratory Syndrome coronavirus 2 (SARS-CoV-2)
QFKHLIPLMY

SEQ ID NO: 2332 - protein, 10 aa, Severe Acute Respiratory Syndrome coronavirus 2 (SARS-CoV-2)
FKHLIPLMYK

SEQ ID NO: 2333 - protein, 10 aa, Severe Acute Respiratory Syndrome coronavirus 2 (SARS-CoV-2)
KHLIPLMYKG

SEQ ID NO: 2334 - protein, 10 aa, Severe Acute Respiratory Syndrome coronavirus 2 (SARS-CoV-2)
HLIPLMYKGL

SEQ ID NO: 2335 - protein, 10 aa, Severe Acute Respiratory Syndrome coronavirus 2 (SARS-CoV-2)
LIPLMYKGLP

SEQ ID NO: 2336 - protein, 10 aa, Severe Acute Respiratory Syndrome coronavirus 2 (SARS-CoV-2)
IPLMYKGLPW

SEQ ID NO: 2337 - protein, 10 aa, Severe Acute Respiratory Syndrome coronavirus 2 (SARS-CoV-2)
PLMYKGLPWN

SEQ ID NO: 2338 - protein, 10 aa, Severe Acute Respiratory Syndrome coronavirus 2 (SARS-CoV-2)
LMYKGLPWNV

SEQ ID NO: 2339 - protein, 10 aa, Severe Acute Respiratory Syndrome coronavirus 2 (SARS-CoV-2)
MYKGLPWNVV

SEQ ID NO: 2340 - protein, 10 aa, Severe Acute Respiratory Syndrome coronavirus 2 (SARS-CoV-2)
YKGLPWNVVR

SEQ ID NO: 2341 - protein, 10 aa, Severe Acute Respiratory Syndrome coronavirus 2 (SARS-CoV-2)
KGLPWNVVRI

SEQ ID NO: 2342 - protein, 10 aa, Severe Acute Respiratory Syndrome coronavirus 2 (SARS-CoV-2)
GLPWNVVRIK

SEQ ID NO: 2343 - protein, 10 aa, Severe Acute Respiratory Syndrome coronavirus 2 (SARS-CoV-2)
LPWNVVRIKG

SEQ ID NO: 2344 - protein, 10 aa, Severe Acute Respiratory Syndrome coronavirus 2 (SARS-CoV-2)
PWNVVRIKGP

SEQ ID NO: 2345 - protein, 10 aa, Severe Acute Respiratory Syndrome coronavirus 2 (SARS-CoV-2)
WNVVRIKGPG

SEQ ID NO: 2346 - protein, 10 aa, Severe Acute Respiratory Syndrome coronavirus 2 (SARS-CoV-2)
NVVRIKGPGP

SEQ ID NO: 2347 - protein, 10 aa, Severe Acute Respiratory Syndrome coronavirus 2 (SARS-CoV-2)
VVRIKGPGPG

SEQ ID NO: 2348 - protein, 10 aa, Severe Acute Respiratory Syndrome coronavirus 2 (SARS-CoV-2)
VRIKGPGPGI

SEQ ID NO: 2349 - protein, 10 aa, Severe Acute Respiratory Syndrome coronavirus 2 (SARS-CoV-2)
RIKGPGPGIP

SEQ ID NO: 2350 - protein, 10 aa, Severe Acute Respiratory Syndrome coronavirus 2 (SARS-CoV-2)
IKGPGPGIPT

SEQ ID NO: 2351 - protein, 10 aa, Severe Acute Respiratory Syndrome coronavirus 2 (SARS-CoV-2)
KGPGPGIPTI

SEQ ID NO: 2352 - protein, 10 aa, Severe Acute Respiratory Syndrome coronavirus 2 (SARS-CoV-2)
GPGPGIPTIT

SEQ ID NO: 2353 - protein, 10 aa, Severe Acute Respiratory Syndrome coronavirus 2 (SARS-CoV-2)
PGPGIPTITQ

SEQ ID NO: 2354 - protein, 10 aa, Severe Acute Respiratory Syndrome coronavirus 2 (SARS-CoV-2)
GPGIPTITQM

SEQ ID NO: 2355 - protein, 10 aa, Severe Acute Respiratory Syndrome coronavirus 2 (SARS-CoV-2)
PGIPTITQMN

SEQ ID NO: 2356 - protein, 10 aa, Severe Acute Respiratory Syndrome coronavirus 2 (SARS-CoV-2)
GIPTITQMNL

SEQ ID NO: 2357 - protein, 10 aa, Severe Acute Respiratory Syndrome coronavirus 2 (SARS-CoV-2)
IPTITQMNLK

SEQ ID NO: 2358 - protein, 10 aa, Severe Acute Respiratory Syndrome coronavirus 2 (SARS-CoV-2)
PTITQMNLKY

SEQ ID NO: 2359 - protein, 10 aa, Severe Acute Respiratory Syndrome coronavirus 2 (SARS-CoV-2)
TITQMNLKYA

SEQ ID NO: 2360 - protein, 10 aa, Severe Acute Respiratory Syndrome coronavirus 2 (SARS-CoV-2)
ITQMNLKYAI

SEQ ID NO: 2361 - protein, 10 aa, Severe Acute Respiratory Syndrome coronavirus 2 (SARS-CoV-2)
TQMNLKYAIS

SEQ ID NO: 2362 - protein, 10 aa, Severe Acute Respiratory Syndrome coronavirus 2 (SARS-CoV-2)
QMNLKYAISA

SEQ ID NO: 2363 - protein, 10 aa, Severe Acute Respiratory Syndrome coronavirus 2 (SARS-CoV-2)
MNLKYAISAK

SEQ ID NO: 2364 - protein, 10 aa, Severe Acute Respiratory Syndrome coronavirus 2 (SARS-CoV-2)
NLKYAISAKN

SEQ ID NO: 2365 - protein, 10 aa, Severe Acute Respiratory Syndrome coronavirus 2 (SARS-CoV-2)
LKYAISAKNR

SEQ ID NO: 2366 - protein, 10 aa, Severe Acute Respiratory Syndrome coronavirus 2 (SARS-CoV-2)
KYAISAKNRA

SEQ ID NO: 2367 - protein, 10 aa, Severe Acute Respiratory Syndrome coronavirus 2 (SARS-CoV-2)
YAISAKNRAR

SEQ ID NO: 2368 - protein, 10 aa, Severe Acute Respiratory Syndrome coronavirus 2 (SARS-CoV-2)
AISAKNRART

SEQ ID NO: 2369 - protein, 10 aa, Severe Acute Respiratory Syndrome coronavirus 2 (SARS-CoV-2)
ISAKNRARTV

SEQ ID NO: 2370 - protein, 10 aa, Severe Acute Respiratory Syndrome coronavirus 2 (SARS-CoV-2)
SAKNRARTVA

SEQ ID NO: 2371 - protein, 10 aa, Severe Acute Respiratory Syndrome coronavirus 2 (SARS-CoV-2)
AKNRARTVAG

SEQ ID NO: 2372 - protein, 10 aa, Severe Acute Respiratory Syndrome coronavirus 2 (SARS-CoV-2)
TAFVTNVNAS

SEQ ID NO: 2373 - protein, 10 aa, Severe Acute Respiratory Syndrome coronavirus 2 (SARS-CoV-2)
AFVTNVNASS

SEQ ID NO: 2374 - protein, 10 aa, Severe Acute Respiratory Syndrome coronavirus 2 (SARS-CoV-2)
FVTNVNASSS

SEQ ID NO: 2375 - protein, 10 aa, Severe Acute Respiratory Syndrome coronavirus 2 (SARS-CoV-2)
VTNVNASSSE

SEQ ID NO: 2376 - protein, 10 aa, Severe Acute Respiratory Syndrome coronavirus 2 (SARS-CoV-2)
TNVNASSSEA

SEQ ID NO: 2377 - protein, 10 aa, Severe Acute Respiratory Syndrome coronavirus 2 (SARS-CoV-2)
NVNASSSEAF

SEQ ID NO: 2378 - protein, 10 aa, Severe Acute Respiratory Syndrome coronavirus 2 (SARS-CoV-2)
VNASSSEAFG

SEQ ID NO: 2379 - protein, 10 aa, Severe Acute Respiratory Syndrome coronavirus 2 (SARS-CoV-2)
NASSSEAFGP

SEQ ID NO: 2380 - protein, 10 aa, Severe Acute Respiratory Syndrome coronavirus 2 (SARS-CoV-2)
ASSSEAFGPG

SEQ ID NO: 2381 - protein, 10 aa, Severe Acute Respiratory Syndrome coronavirus 2 (SARS-CoV-2)
SSSEAFGPGP

SEQ ID NO: 2382 - protein, 10 aa, Severe Acute Respiratory Syndrome coronavirus 2 (SARS-CoV-2)
SSEAFGPGPG

SEQ ID NO: 2383 - protein, 10 aa, Severe Acute Respiratory Syndrome coronavirus 2 (SARS-CoV-2)
SEAFGPGPGL

SEQ ID NO: 2384 - protein, 10 aa, Severe Acute Respiratory Syndrome coronavirus 2 (SARS-CoV-2)
EAFGPGPGLY

SEQ ID NO: 2385 - protein, 10 aa, Severe Acute Respiratory Syndrome coronavirus 2 (SARS-CoV-2)
AFGPGPGLYF

SEQ ID NO: 2386 - protein, 10 aa, Severe Acute Respiratory Syndrome coronavirus 2 (SARS-CoV-2)
FGPGPGLYFI

SEQ ID NO: 2387 - protein, 10 aa, Severe Acute Respiratory Syndrome coronavirus 2 (SARS-CoV-2)
GPGPGLYFIK

SEQ ID NO: 2388 - protein, 10 aa, Severe Acute Respiratory Syndrome coronavirus 2 (SARS-CoV-2)
PGPGLYFIKG

SEQ ID NO: 2389 - protein, 10 aa, Severe Acute Respiratory Syndrome coronavirus 2 (SARS-CoV-2)
GPGLYFIKGL

SEQ ID NO: 2390 - protein, 10 aa, Severe Acute Respiratory Syndrome coronavirus 2 (SARS-CoV-2)
PGLYFIKGLN

SEQ ID NO: 2391 - protein, 10 aa, Severe Acute Respiratory Syndrome coronavirus 2 (SARS-CoV-2)
GLYFIKGLNN

SEQ ID NO: 2392 - protein, 10 aa, Severe Acute Respiratory Syndrome coronavirus 2 (SARS-CoV-2)
LYFIKGLNNL

SEQ ID NO: 2393 - protein, 10 aa, Severe Acute Respiratory Syndrome coronavirus 2 (SARS-CoV-2)
YFIKGLNNLN

SEQ ID NO: 2394 - protein, 10 aa, Severe Acute Respiratory Syndrome coronavirus 2 (SARS-CoV-2)
FIKGLNNLNR

SEQ ID NO: 2395 - protein, 10 aa, Severe Acute Respiratory Syndrome coronavirus 2 (SARS-CoV-2)
IKGLNNLNRG

SEQ ID NO: 2396 - protein, 10 aa, Severe Acute Respiratory Syndrome coronavirus 2 (SARS-CoV-2)
KGLNNLNRGG

SEQ ID NO: 2397 - protein, 10 aa, Severe Acute Respiratory Syndrome coronavirus 2 (SARS-CoV-2)
GLNNLNRGGP

SEQ ID NO: 2398 - protein, 10 aa, Severe Acute Respiratory Syndrome coronavirus 2 (SARS-CoV-2)
LNNLNRGGPG

SEQ ID NO: 2399 - protein, 10 aa, Severe Acute Respiratory Syndrome coronavirus 2 (SARS-CoV-2)
NNLNRGGPGP

SEQ ID NO: 2400 - protein, 10 aa, Severe Acute Respiratory Syndrome coronavirus 2 (SARS-CoV-2)
NLNRGGPGPG

SEQ ID NO: 2401 - protein, 10 aa, Severe Acute Respiratory Syndrome coronavirus 2 (SARS-CoV-2)
LNRGGPGPGR

SEQ ID NO: 2402 - protein, 10 aa, Severe Acute Respiratory Syndrome coronavirus 2 (SARS-CoV-2)
NRGGPGPGRK

SEQ ID NO: 2403 - protein, 10 aa, Severe Acute Respiratory Syndrome coronavirus 2 (SARS-CoV-2)
RGGPGPGRKA

SEQ ID NO: 2404 - protein, 10 aa, Severe Acute Respiratory Syndrome coronavirus 2 (SARS-CoV-2)
GGPGPGRKAV

SEQ ID NO: 2405 - protein, 10 aa, Severe Acute Respiratory Syndrome coronavirus 2 (SARS-CoV-2)
GPGPGRKAVF

SEQ ID NO: 2406 - protein, 10 aa, Severe Acute Respiratory Syndrome coronavirus 2 (SARS-CoV-2)
PGPGRKAVFI

SEQ ID NO: 2407 - protein, 10 aa, Severe Acute Respiratory Syndrome coronavirus 2 (SARS-CoV-2)
GPGRKAVFIS

SEQ ID NO: 2408 - protein, 10 aa, Severe Acute Respiratory Syndrome coronavirus 2 (SARS-CoV-2)
PGRKAVFISP

SEQ ID NO: 2409 - protein, 10 aa, Severe Acute Respiratory Syndrome coronavirus 2 (SARS-CoV-2)
GRKAVFISPY

SEQ ID NO: 2410 - protein, 10 aa, Severe Acute Respiratory Syndrome coronavirus 2 (SARS-CoV-2)
RKAVFISPYN

SEQ ID NO: 2411 - protein, 10 aa, Severe Acute Respiratory Syndrome coronavirus 2 (SARS-CoV-2)
KAVFISPYNS

SEQ ID NO: 2412 - protein, 10 aa, Severe Acute Respiratory Syndrome coronavirus 2 (SARS-CoV-2)
AVFISPYNSQ

SEQ ID NO: 2413 - protein, 10 aa, Severe Acute Respiratory Syndrome coronavirus 2 (SARS-CoV-2)
VFISPYNSQN

SEQ ID NO: 2414 - protein, 10 aa, Severe Acute Respiratory Syndrome coronavirus 2 (SARS-CoV-2)
FISPYNSQNA

SEQ ID NO: 2415 - protein, 10 aa, Severe Acute Respiratory Syndrome coronavirus 2 (SARS-CoV-2)
ISPYNSQNAV

SEQ ID NO: 2416 - protein, 10 aa, Severe Acute Respiratory Syndrome coronavirus 2 (SARS-CoV-2)
SPYNSQNAVA

SEQ ID NO: 2417 - protein, 10 aa, Severe Acute Respiratory Syndrome coronavirus 2 (SARS-CoV-2)
PYNSQNAVAS

SEQ ID NO: 2418 - protein, 10 aa, Severe Acute Respiratory Syndrome coronavirus 2 (SARS-CoV-2)
YNSQNAVASK

SEQ ID NO: 2419 - protein, 10 aa, Severe Acute Respiratory Syndrome coronavirus 2 (SARS-CoV-2)
NSQNAVASKI

SEQ ID NO: 2420 - protein, 10 aa, Severe Acute Respiratory Syndrome coronavirus 2 (SARS-CoV-2)
SQNAVASKIL

SEQ ID NO: 2421 - protein, 10 aa, Severe Acute Respiratory Syndrome coronavirus 2 (SARS-CoV-2)
QNAVASKILG

SEQ ID NO: 2422 - protein, 10 aa, Severe Acute Respiratory Syndrome coronavirus 2 (SARS-CoV-2)
NAVASKILGL

SEQ ID NO: 2423 - protein, 10 aa, Severe Acute Respiratory Syndrome coronavirus 2 (SARS-CoV-2)
VDAVNLLTNM

SEQ ID NO: 2424 - protein, 10 aa, Severe Acute Respiratory Syndrome coronavirus 2 (SARS-CoV-2)
DAVNLLTNMF

SEQ ID NO: 2425 - protein, 10 aa, Severe Acute Respiratory Syndrome coronavirus 2 (SARS-CoV-2)
AVNLLTNMFT

SEQ ID NO: 2426 - protein, 10 aa, Severe Acute Respiratory Syndrome coronavirus 2 (SARS-CoV-2)
VNLLTNMFTP

SEQ ID NO: 2427 - protein, 10 aa, Severe Acute Respiratory Syndrome coronavirus 2 (SARS-CoV-2)
NLLTNMFTPL

SEQ ID NO: 2428 - protein, 10 aa, Severe Acute Respiratory Syndrome coronavirus 2 (SARS-CoV-2)
LLTNMFTPLI

SEQ ID NO: 2429 - protein, 10 aa, Severe Acute Respiratory Syndrome coronavirus 2 (SARS-CoV-2)
LTNMFTPLIQ

SEQ ID NO: 2430 - protein, 10 aa, Severe Acute Respiratory Syndrome coronavirus 2 (SARS-CoV-2)
TNMFTPLIQP

SEQ ID NO: 2431 - protein, 10 aa, Severe Acute Respiratory Syndrome coronavirus 2 (SARS-CoV-2)
NMFTPLIQPI

SEQ ID NO: 2432 - protein, 10 aa, Severe Acute Respiratory Syndrome coronavirus 2 (SARS-CoV-2)
MFTPLIQPIG

SEQ ID NO: 2433 - protein, 10 aa, Severe Acute Respiratory Syndrome coronavirus 2 (SARS-CoV-2)
FTPLIQPIGA

SEQ ID NO: 2434 - protein, 10 aa, Severe Acute Respiratory Syndrome coronavirus 2 (SARS-CoV-2)
TPLIQPIGAL

SEQ ID NO: 2435 - protein, 10 aa, Severe Acute Respiratory Syndrome coronavirus 2 (SARS-CoV-2)
PLIQPIGALD

SEQ ID NO: 2436 - protein, 10 aa, Severe Acute Respiratory Syndrome coronavirus 2 (SARS-CoV-2)
LIQPIGALDK

SEQ ID NO: 2437 - protein, 10 aa, Severe Acute Respiratory Syndrome coronavirus 2 (SARS-CoV-2)
IQPIGALDKG

SEQ ID NO: 2438 - protein, 10 aa, Severe Acute Respiratory Syndrome coronavirus 2 (SARS-CoV-2)
QPIGALDKGR

SEQ ID NO: 2439 - protein, 10 aa, Severe Acute Respiratory Syndrome coronavirus 2 (SARS-CoV-2)
PIGALDKGRL

SEQ ID NO: 2440 - protein, 10 aa, Severe Acute Respiratory Syndrome coronavirus 2 (SARS-CoV-2)
IGALDKGRLI

SEQ ID NO: 2441 - protein, 10 aa, Severe Acute Respiratory Syndrome coronavirus 2 (SARS-CoV-2)
GALDKGRLII

SEQ ID NO: 2442 - protein, 10 aa, Severe Acute Respiratory Syndrome coronavirus 2 (SARS-CoV-2)
ALDKGRLIIR

SEQ ID NO: 2443 - protein, 10 aa, Severe Acute Respiratory Syndrome coronavirus 2 (SARS-CoV-2)
LDKGRLIIRE

SEQ ID NO: 2444 - protein, 10 aa, Severe Acute Respiratory Syndrome coronavirus 2 (SARS-CoV-2)
DKGRLIIREN

SEQ ID NO: 2445 - protein, 10 aa, Severe Acute Respiratory Syndrome coronavirus 2 (SARS-CoV-2)
KGRLIIRENN

SEQ ID NO: 2446 - protein, 10 aa, Severe Acute Respiratory Syndrome coronavirus 2 (SARS-CoV-2)
GRLIIRENNR

SEQ ID NO: 2447 - protein, 10 aa, Severe Acute Respiratory Syndrome coronavirus 2 (SARS-CoV-2)
RLIIRENNRV

SEQ ID NO: 2448 - protein, 10 aa, Severe Acute Respiratory Syndrome coronavirus 2 (SARS-CoV-2)
LIIRENNRVV

SEQ ID NO: 2449 - protein, 10 aa, Severe Acute Respiratory Syndrome coronavirus 2 (SARS-CoV-2)
IIRENNRVVI

SEQ ID NO: 2450 - protein, 10 aa, Severe Acute Respiratory Syndrome coronavirus 2 (SARS-CoV-2)
IRENNRVVIS

SEQ ID NO: 2451 - protein, 10 aa, Severe Acute Respiratory Syndrome coronavirus 2 (SARS-CoV-2)
RENNRVVISS

SEQ ID NO: 2452 - protein, 10 aa, Severe Acute Respiratory Syndrome coronavirus 2 (SARS-CoV-2)
ENNRVVISSG

SEQ ID NO: 2453 - protein, 10 aa, Severe Acute Respiratory Syndrome coronavirus 2 (SARS-CoV-2)
NNRVVISSGP

SEQ ID NO: 2454 - protein, 10 aa, Severe Acute Respiratory Syndrome coronavirus 2 (SARS-CoV-2)
NRVVISSGPG

SEQ ID NO: 2455 - protein, 10 aa, Severe Acute Respiratory Syndrome coronavirus 2 (SARS-CoV-2)
RVVISSGPGP

SEQ ID NO: 2456 - protein, 10 aa, Severe Acute Respiratory Syndrome coronavirus 2 (SARS-CoV-2)
VVISSGPGPG

SEQ ID NO: 2457 - protein, 10 aa, Severe Acute Respiratory Syndrome coronavirus 2 (SARS-CoV-2)
VISSGPGPGT

SEQ ID NO: 2458 - protein, 10 aa, Severe Acute Respiratory Syndrome coronavirus 2 (SARS-CoV-2)
ISSGPGPGTE

SEQ ID NO: 2459 - protein, 10 aa, Severe Acute Respiratory Syndrome coronavirus 2 (SARS-CoV-2)
SSGPGPGTER

SEQ ID NO: 2460 - protein, 10 aa, Severe Acute Respiratory Syndrome coronavirus 2 (SARS-CoV-2)
SGPGPGTERL

SEQ ID NO: 2461 - protein, 10 aa, Severe Acute Respiratory Syndrome coronavirus 2 (SARS-CoV-2)
GPGPGTERLK

SEQ ID NO: 2462 - protein, 10 aa, Severe Acute Respiratory Syndrome coronavirus 2 (SARS-CoV-2)
PGPGTERLKL

SEQ ID NO: 2463 - protein, 10 aa, Severe Acute Respiratory Syndrome coronavirus 2 (SARS-CoV-2)
GPGTERLKLF

SEQ ID NO: 2464 - protein, 10 aa, Severe Acute Respiratory Syndrome coronavirus 2 (SARS-CoV-2)
PGTERLKLFA

SEQ ID NO: 2465 - protein, 10 aa, Severe Acute Respiratory Syndrome coronavirus 2 (SARS-CoV-2)
GTERLKLFAA

SEQ ID NO: 2466 - protein, 10 aa, Severe Acute Respiratory Syndrome coronavirus 2 (SARS-CoV-2)
TERLKLFAAE

SEQ ID NO: 2467 - protein, 10 aa, Severe Acute Respiratory Syndrome coronavirus 2 (SARS-CoV-2)
ERLKLFAAET

SEQ ID NO: 2468 - protein, 10 aa, Severe Acute Respiratory Syndrome coronavirus 2 (SARS-CoV-2)
RLKLFAAETL

SEQ ID NO: 2469 - protein, 10 aa, Severe Acute Respiratory Syndrome coronavirus 2 (SARS-CoV-2)
LKLFAAETLK

SEQ ID NO: 2470 - protein, 10 aa, Severe Acute Respiratory Syndrome coronavirus 2 (SARS-CoV-2)
KLFAAETLKA

SEQ ID NO: 2471 - protein, 10 aa, Severe Acute Respiratory Syndrome coronavirus 2 (SARS-CoV-2)
LFAAETLKAT

SEQ ID NO: 2472 - protein, 10 aa, Severe Acute Respiratory Syndrome coronavirus 2 (SARS-CoV-2)
FAAETLKATE

SEQ ID NO: 2473 - protein, 10 aa, Severe Acute Respiratory Syndrome coronavirus 2 (SARS-CoV-2)
AAETLKATEE

SEQ ID NO: 2474 - protein, 10 aa, Severe Acute Respiratory Syndrome coronavirus 2 (SARS-CoV-2)
SSNVNRFNVA

SEQ ID NO: 2475 - protein, 10 aa, Severe Acute Respiratory Syndrome coronavirus 2 (SARS-CoV-2)
SNVNRFNVAI

SEQ ID NO: 2476 - protein, 10 aa, Severe Acute Respiratory Syndrome coronavirus 2 (SARS-CoV-2)
NVNRFNVAIT

SEQ ID NO: 2477 - protein, 10 aa, Severe Acute Respiratory Syndrome coronavirus 2 (SARS-CoV-2)
VNRFNVAITR

SEQ ID NO: 2478 - protein, 10 aa, Severe Acute Respiratory Syndrome coronavirus 2 (SARS-CoV-2)
NRFNVAITRA

SEQ ID NO: 2479 - protein, 10 aa, Severe Acute Respiratory Syndrome coronavirus 2 (SARS-CoV-2)
RFNVAITRAK

SEQ ID NO: 2480 - protein, 10 aa, Severe Acute Respiratory Syndrome coronavirus 2 (SARS-CoV-2)
FNVAITRAKV

SEQ ID NO: 2481 - protein, 10 aa, Severe Acute Respiratory Syndrome coronavirus 2 (SARS-CoV-2)
NVAITRAKVG

SEQ ID NO: 2482 - protein, 10 aa, Severe Acute Respiratory Syndrome coronavirus 2 (SARS-CoV-2)
VAITRAKVGI

SEQ ID NO: 2483 - protein, 10 aa, Severe Acute Respiratory Syndrome coronavirus 2 (SARS-CoV-2)
AITRAKVGIL

SEQ ID NO: 2484 - protein, 10 aa, Severe Acute Respiratory Syndrome coronavirus 2 (SARS-CoV-2)
ITRAKVGILS

SEQ ID NO: 2485 - protein, 10 aa, Severe Acute Respiratory Syndrome coronavirus 2 (SARS-CoV-2)
TRAKVGILSI

SEQ ID NO: 2486 - protein, 10 aa, Severe Acute Respiratory Syndrome coronavirus 2 (SARS-CoV-2)
RAKVGILSIM

SEQ ID NO: 2487 - protein, 10 aa, Severe Acute Respiratory Syndrome coronavirus 2 (SARS-CoV-2)
AKVGILSIMG

SEQ ID NO: 2488 - protein, 10 aa, Severe Acute Respiratory Syndrome coronavirus 2 (SARS-CoV-2)
KVGILSIMGP

SEQ ID NO: 2489 - protein, 10 aa, Severe Acute Respiratory Syndrome coronavirus 2 (SARS-CoV-2)
VGILSIMGPG

SEQ ID NO: 2490 - protein, 10 aa, Severe Acute Respiratory Syndrome coronavirus 2 (SARS-CoV-2)
GILSIMGPGP

SEQ ID NO: 2491 - protein, 10 aa, Severe Acute Respiratory Syndrome coronavirus 2 (SARS-CoV-2)
ILSIMGPGPG

SEQ ID NO: 2492 - protein, 10 aa, Severe Acute Respiratory Syndrome coronavirus 2 (SARS-CoV-2)
LSIMGPGPGG

SEQ ID NO: 2493 - protein, 10 aa, Severe Acute Respiratory Syndrome coronavirus 2 (SARS-CoV-2)
SIMGPGPGGS

SEQ ID NO: 2494 - protein, 10 aa, Severe Acute Respiratory Syndrome coronavirus 2 (SARS-CoV-2)
IMGPGPGGSL

SEQ ID NO: 2495 - protein, 10 aa, Severe Acute Respiratory Syndrome coronavirus 2 (SARS-CoV-2)
MGPGPGGSLY

SEQ ID NO: 2496 - protein, 10 aa, Severe Acute Respiratory Syndrome coronavirus 2 (SARS-CoV-2)
GPGPGGSLYV

SEQ ID NO: 2497 - protein, 10 aa, Severe Acute Respiratory Syndrome coronavirus 2 (SARS-CoV-2)
PGPGGSLYVN

SEQ ID NO: 2498 - protein, 10 aa, Severe Acute Respiratory Syndrome coronavirus 2 (SARS-CoV-2)
GPGGSLYVNK

SEQ ID NO: 2499 - protein, 10 aa, Severe Acute Respiratory Syndrome coronavirus 2 (SARS-CoV-2)
PGGSLYVNKH

SEQ ID NO: 2500 - protein, 10 aa, Severe Acute Respiratory Syndrome coronavirus 2 (SARS-CoV-2)
GGSLYVNKHA

SEQ ID NO: 2501 - protein, 10 aa, Severe Acute Respiratory Syndrome coronavirus 2 (SARS-CoV-2)
GSLYVNKHAF

SEQ ID NO: 2502 - protein, 10 aa, Severe Acute Respiratory Syndrome coronavirus 2 (SARS-CoV-2)
SLYVNKHAFH

SEQ ID NO: 2503 - protein, 10 aa, Severe Acute Respiratory Syndrome coronavirus 2 (SARS-CoV-2)
LYVNKHAFHT

SEQ ID NO: 2504 - protein, 10 aa, Severe Acute Respiratory Syndrome coronavirus 2 (SARS-CoV-2)
YVNKHAFHTP

SEQ ID NO: 2505 - protein, 10 aa, Severe Acute Respiratory Syndrome coronavirus 2 (SARS-CoV-2)
VNKHAFHTPA

SEQ ID NO: 2506 - protein, 10 aa, Severe Acute Respiratory Syndrome coronavirus 2 (SARS-CoV-2)
NKHAFHTPAF

SEQ ID NO: 2507 - protein, 10 aa, Severe Acute Respiratory Syndrome coronavirus 2 (SARS-CoV-2)
KHAFHTPAFD

SEQ ID NO: 2508 - protein, 10 aa, Severe Acute Respiratory Syndrome coronavirus 2 (SARS-CoV-2)
HAFHTPAFDT

SEQ ID NO: 2509 - protein, 10 aa, Severe Acute Respiratory Syndrome coronavirus 2 (SARS-CoV-2)
AFHTPAFDTQ

SEQ ID NO: 2510 - protein, 10 aa, Severe Acute Respiratory Syndrome coronavirus 2 (SARS-CoV-2)
FHTPAFDTQS

SEQ ID NO: 2511 - protein, 10 aa, Severe Acute Respiratory Syndrome coronavirus 2 (SARS-CoV-2)
HTPAFDTQSL

SEQ ID NO: 2512 - protein, 10 aa, Severe Acute Respiratory Syndrome coronavirus 2 (SARS-CoV-2)
TPAFDTQSLL

SEQ ID NO: 2513 - protein, 10 aa, Severe Acute Respiratory Syndrome coronavirus 2 (SARS-CoV-2)
PAFDTQSLLI

SEQ ID NO: 2514 - protein, 10 aa, Severe Acute Respiratory Syndrome coronavirus 2 (SARS-CoV-2)
AFDTQSLLIV

SEQ ID NO: 2515 - protein, 10 aa, Severe Acute Respiratory Syndrome coronavirus 2 (SARS-CoV-2)
FDTQSLLIVN

SEQ ID NO: 2516 - protein, 10 aa, Severe Acute Respiratory Syndrome coronavirus 2 (SARS-CoV-2)
DTQSLLIVNN

SEQ ID NO: 2517 - protein, 10 aa, Severe Acute Respiratory Syndrome coronavirus 2 (SARS-CoV-2)
TQSLLIVNNA

SEQ ID NO: 2518 - protein, 10 aa, Severe Acute Respiratory Syndrome coronavirus 2 (SARS-CoV-2)
QSLLIVNNAT

SEQ ID NO: 2519 - protein, 10 aa, Severe Acute Respiratory Syndrome coronavirus 2 (SARS-CoV-2)
SLLIVNNATN

SEQ ID NO: 2520 - protein, 10 aa, Severe Acute Respiratory Syndrome coronavirus 2 (SARS-CoV-2)
LLIVNNATNV

SEQ ID NO: 2521 - protein, 10 aa, Severe Acute Respiratory Syndrome coronavirus 2 (SARS-CoV-2)
LIVNNATNVV

SEQ ID NO: 2522 - protein, 10 aa, Severe Acute Respiratory Syndrome coronavirus 2 (SARS-CoV-2)
IVNNATNVVI

SEQ ID NO: 2523 - protein, 10 aa, Severe Acute Respiratory Syndrome coronavirus 2 (SARS-CoV-2)
VNNATNVVIK

SEQ ID NO: 2524 - protein, 10 aa, Severe Acute Respiratory Syndrome coronavirus 2 (SARS-CoV-2)
NNATNVVIKV

SEQ ID NO: 2525 - protein, 10 aa, Severe Acute Respiratory Syndrome coronavirus 2 (SARS-CoV-2)
LSHFVNLDNL

SEQ ID NO: 2526 - protein, 10 aa, Severe Acute Respiratory Syndrome coronavirus 2 (SARS-CoV-2)
SHFVNLDNLR

SEQ ID NO: 2527 - protein, 10 aa, Severe Acute Respiratory Syndrome coronavirus 2 (SARS-CoV-2)
HFVNLDNLRA

SEQ ID NO: 2528 - protein, 10 aa, Severe Acute Respiratory Syndrome coronavirus 2 (SARS-CoV-2)
FVNLDNLRAN

SEQ ID NO: 2529 - protein, 10 aa, Severe Acute Respiratory Syndrome coronavirus 2 (SARS-CoV-2)
VNLDNLRANN

SEQ ID NO: 2530 - protein, 10 aa, Severe Acute Respiratory Syndrome coronavirus 2 (SARS-CoV-2)
NLDNLRANNT

SEQ ID NO: 2531 - protein, 10 aa, Severe Acute Respiratory Syndrome coronavirus 2 (SARS-CoV-2)
LDNLRANNTK

SEQ ID NO: 2532 - protein, 10 aa, Severe Acute Respiratory Syndrome coronavirus 2 (SARS-CoV-2)
DNLRANNTKG

SEQ ID NO: 2533 - protein, 10 aa, Severe Acute Respiratory Syndrome coronavirus 2 (SARS-CoV-2)
NLRANNTKGS

SEQ ID NO: 2534 - protein, 10 aa, Severe Acute Respiratory Syndrome coronavirus 2 (SARS-CoV-2)
LRANNTKGSL

SEQ ID NO: 2535 - protein, 10 aa, Severe Acute Respiratory Syndrome coronavirus 2 (SARS-CoV-2)
RANNTKGSLP

SEQ ID NO: 2536 - protein, 10 aa, Severe Acute Respiratory Syndrome coronavirus 2 (SARS-CoV-2)
ANNTKGSLPI

SEQ ID NO: 2537 - protein, 10 aa, Severe Acute Respiratory Syndrome coronavirus 2 (SARS-CoV-2)
NNTKGSLPIG

SEQ ID NO: 2538 - protein, 10 aa, Severe Acute Respiratory Syndrome coronavirus 2 (SARS-CoV-2)
NTKGSLPIGP

SEQ ID NO: 2539 - protein, 10 aa, Severe Acute Respiratory Syndrome coronavirus 2 (SARS-CoV-2)
TKGSLPIGPG

SEQ ID NO: 2540 - protein, 10 aa, Severe Acute Respiratory Syndrome coronavirus 2 (SARS-CoV-2)
KGSLPIGPGP

SEQ ID NO: 2541 - protein, 10 aa, Severe Acute Respiratory Syndrome coronavirus 2 (SARS-CoV-2)
GSLPIGPGPG

SEQ ID NO: 2542 - protein, 10 aa, Severe Acute Respiratory Syndrome coronavirus 2 (SARS-CoV-2)
SLPIGPGPGY

SEQ ID NO: 2543 - protein, 10 aa, Severe Acute Respiratory Syndrome coronavirus 2 (SARS-CoV-2)
LPIGPGPGYE

SEQ ID NO: 2544 - protein, 10 aa, Severe Acute Respiratory Syndrome coronavirus 2 (SARS-CoV-2)
PIGPGPGYED

SEQ ID NO: 2545 - protein, 10 aa, Severe Acute Respiratory Syndrome coronavirus 2 (SARS-CoV-2)
IGPGPGYEDL

SEQ ID NO: 2546 - protein, 10 aa, Severe Acute Respiratory Syndrome coronavirus 2 (SARS-CoV-2)
GPGPGYEDLL

SEQ ID NO: 2547 - protein, 10 aa, Severe Acute Respiratory Syndrome coronavirus 2 (SARS-CoV-2)
PGPGYEDLLI

SEQ ID NO: 2548 - protein, 10 aa, Severe Acute Respiratory Syndrome coronavirus 2 (SARS-CoV-2)
GPGYEDLLIR

SEQ ID NO: 2549 - protein, 10 aa, Severe Acute Respiratory Syndrome coronavirus 2 (SARS-CoV-2)
PGYEDLLIRK

SEQ ID NO: 2550 - protein, 10 aa, Severe Acute Respiratory Syndrome coronavirus 2 (SARS-CoV-2)
GYEDLLIRKS

SEQ ID NO: 2551 - protein, 10 aa, Severe Acute Respiratory Syndrome coronavirus 2 (SARS-CoV-2)
YEDLLIRKSN

SEQ ID NO: 2552 - protein, 10 aa, Severe Acute Respiratory Syndrome coronavirus 2 (SARS-CoV-2)
EDLLIRKSNH

SEQ ID NO: 2553 - protein, 10 aa, Severe Acute Respiratory Syndrome coronavirus 2 (SARS-CoV-2)
DLLIRKSNHN

SEQ ID NO: 2554 - protein, 10 aa, Severe Acute Respiratory Syndrome coronavirus 2 (SARS-CoV-2)
LLIRKSNHNF

SEQ ID NO: 2555 - protein, 10 aa, Severe Acute Respiratory Syndrome coronavirus 2 (SARS-CoV-2)
LIRKSNHNFL

SEQ ID NO: 2556 - protein, 10 aa, Severe Acute Respiratory Syndrome coronavirus 2 (SARS-CoV-2)
IRKSNHNFLV

SEQ ID NO: 2557 - protein, 10 aa, Severe Acute Respiratory Syndrome coronavirus 2 (SARS-CoV-2)
RKSNHNFLVQ

SEQ ID NO: 2558 - protein, 10 aa, Severe Acute Respiratory Syndrome coronavirus 2 (SARS-CoV-2)
KSNHNFLVQA

SEQ ID NO: 2559 - protein, 10 aa, Severe Acute Respiratory Syndrome coronavirus 2 (SARS-CoV-2)
SNHNFLVQAG

SEQ ID NO: 2560 - protein, 10 aa, Severe Acute Respiratory Syndrome coronavirus 2 (SARS-CoV-2)
NHNFLVQAGN

SEQ ID NO: 2561 - protein, 9 aa, Severe Acute Respiratory Syndrome coronavirus 2 (SARS-CoV-2)
NTDHSSSSD

SEQ ID NO: 2562 - protein, 11 aa, Severe Acute Respiratory Syndrome coronavirus 2 (SARS-CoV-2)
IFWRNTNPIQL

SEQ ID NO: 2563 - protein, 17 aa, Severe Acute Respiratory Syndrome coronavirus 2 (SARS-CoV-2)
FVNEFYAYLRKHFSMMI

SEQ ID NO: 2564 - protein, 17 aa, Severe Acute Respiratory Syndrome coronavirus 2 (SARS-CoV-2)
FVNEFYAYLRKHFSMMI

SEQ ID NO: 2565 - protein, 15 aa, Severe Acute Respiratory Syndrome coronavirus 2 (SARS-CoV-2)
WALIISVTSNYSGVV

SEQ ID NO: 2566 - protein, 17 aa, Severe Acute Respiratory Syndrome coronavirus 2 (SARS-CoV-2)
IKNFKSVLYYQNNVFMS

SEQ ID NO: 2567 - protein, 13 aa, Severe Acute Respiratory Syndrome coronavirus 2 (SARS-CoV-2)
IVTALRANSAVKL

SEQ ID NO: 2568 - protein, 17 aa, Severe Acute Respiratory Syndrome coronavirus 2 (SARS-CoV-2)
YNYLYRLFRKSNLKPFE

SEQ ID NO: 2569 - protein, 17 aa, Severe Acute Respiratory Syndrome coronavirus 2 (SARS-CoV-2)
YNYLYRLFRKSNLKPFE

SEQ ID NO: 2570 - protein, 12 aa, Severe Acute Respiratory Syndrome coronavirus 2 (SARS-CoV-2)
MLRIMASLVLAR

SEQ ID NO: 2571 - protein, 18 aa, Severe Acute Respiratory Syndrome coronavirus 2 (SARS-CoV-2)
LTQYNRYLALYNKYKYFS

SEQ ID NO: 2572 - protein, 18 aa, Severe Acute Respiratory Syndrome coronavirus 2 (SARS-CoV-2)
LTQYNRYLALYNKYKYFS

SEQ ID NO: 2573 - protein, 12 aa, Severe Acute Respiratory Syndrome coronavirus 2 (SARS-CoV-2)
YRRLISMMGFKM

SEQ ID NO: 2574 - protein, 12 aa, Severe Acute Respiratory Syndrome coronavirus 2 (SARS-CoV-2)
YRRLISMMGFKM

SEQ ID NO: 2575 - protein, 17 aa, Severe Acute Respiratory Syndrome coronavirus 2 (SARS-CoV-2)
FKHLIPLMYKGLPWNVV

SEQ ID NO: 2576 - protein, 15 aa, Severe Acute Respiratory Syndrome coronavirus 2 (SARS-CoV-2)
MNLKYAISAKNRART

SEQ ID NO: 2577 - protein, 15 aa, Severe Acute Respiratory Syndrome coronavirus 2 (SARS-CoV-2)
MNLKYAISAKNRART

SEQ ID NO: 2578 - protein, 13 aa, Severe Acute Respiratory Syndrome coronavirus 2 (SARS-CoV-2)
FVTNVNASSSEAF

SEQ ID NO: 2579 - protein, 13 aa, Severe Acute Respiratory Syndrome coronavirus 2 (SARS-CoV-2)
FVTNVNASSSEAF

SEQ ID NO: 2580 - protein, 10 aa, Severe Acute Respiratory Syndrome coronavirus 2 (SARS-CoV-2)
FIKGLNNLNR

SEQ ID NO: 2581 - protein, 10 aa, Severe Acute Respiratory Syndrome coronavirus 2 (SARS-CoV-2)
FIKGLNNLNR

SEQ ID NO: 2582 - protein, 16 aa, Severe Acute Respiratory Syndrome coronavirus 2 (SARS-CoV-2)
VFISPYNSQNAVASKI

SEQ ID NO: 2583 - protein, 16 aa, Severe Acute Respiratory Syndrome coronavirus 2 (SARS-CoV-2)
VNLLTNMFTPLIQPIG

SEQ ID NO: 2584 - protein, 11 aa, Severe Acute Respiratory Syndrome coronavirus 2 (SARS-CoV-2)
LIIRENNRVVI

SEQ ID NO: 2585 - protein, 11 aa, Severe Acute Respiratory Syndrome coronavirus 2 (SARS-CoV-2)
LIIRENNRVVI

SEQ ID NO: 2586 - protein, 11 aa, Severe Acute Respiratory Syndrome coronavirus 2 (SARS-CoV-2)
LKLFAAETLKA

SEQ ID NO: 2587 - protein, 16 aa, Severe Acute Respiratory Syndrome coronavirus 2 (SARS-CoV-2)
VNRFNVAITRAKVGIL

SEQ ID NO: 2588 - protein, 10 aa, Severe Acute Respiratory Syndrome coronavirus 2 (SARS-CoV-2)
LYVNKHAFHT

SEQ ID NO: 2589 - protein, 10 aa, Severe Acute Respiratory Syndrome coronavirus 2 (SARS-CoV-2)
LYVNKHAFHT

SEQ ID NO: 2590 - protein, 12 aa, Severe Acute Respiratory Syndrome coronavirus 2 (SARS-CoV-2)
LLIVNNATNVVI

SEQ ID NO: 2591 - protein, 15 aa, Severe Acute Respiratory Syndrome coronavirus 2 (SARS-CoV-2)
FVNLDNLRANNTKGS

SEQ ID NO: 2592 - protein, 13 aa, Severe Acute Respiratory Syndrome coronavirus 2 (SARS-CoV-2)
LLIRKSNHNFLVQ

SEQ ID NO: 2593 - protein, 47 aa, Artificial Sequence
  Synthetic
ANYIFWRNTNPIQLSSYGPGPGDVDTDFVNEFYAYLRKHFSMMILSD

SEQ ID NO: 2594 - protein, 49 aa, Artificial Sequence
  Synthetic
ISMWALIISVTSNYSGVVTTVGPGPGVASIKNFKSVLYYQNNVFMSEAK

SEQ ID NO: 2595 - protein, 60 aa, Artificial Sequence; identical to SEQ ID NO: 1687
  Synthetic

SEQ ID NO: 2596 - protein, 49 aa, Artificial Sequence
  Synthetic
LLPLTQYNRYLALYNKYKYFSGAMDGPGPGDMTYRRLISMMGFKMNYQV

SEQ ID NO: 2597 - protein, 52 aa, Artificial Sequence
  Synthetic
GDQFKHLIPLMYKGLPWNVVRIKGPGPGIPTITQMNLKYAISAKNRARTVAG

SEQ ID NO: 2598 - protein, 60 aa, Artificial Sequence; identical to SEQ ID NO: 1690
  Synthetic

SEQ ID NO: 2599 - protein, 60 aa, Artificial Sequence; identical to SEQ ID NO: 1691
  Synthetic

SEQ ID NO: 2600 - protein, 60 aa, Artificial Sequence; identical to SEQ ID NO: 1692
  Synthetic

SEQ ID NO: 2601 - protein, 45 aa, Artificial Sequence
  Synthetic
LSHFVNLDNLRANNTKGSLPIGPGPGYEDLLIRKSNHNFLVQAGN

SEQ ID NO: 2602 - protein, 219 aa, Artificial Sequence
  Synthetic
GKGYHLMSFPQSAPHQTLLALHRSYLTPGDSSVLSFELLHAPATVCGQKLIANQFNSAIGKIQDSLQIPFAMQMAYRFNGIGVPKEITVATSRTLSYYPTNFTISVTTEILPVICLLQFAYANRNRFLYINDGVYFASTEKSNIIRTDEMIAQYTSALLANKCVNFNFNGLTGTGVLTEDGYFKIYSKHTPINLQDLFLPFFSNVTWFHAIHVSGTNGT

SEQ ID NO: 2603 - protein, 206 aa, Artificial Sequence
  Synthetic
GRLQSLQTYVTQQLVEGFNCYFPLQSYGFQPTNGVGYQPYFLGVYYHKNNKSWMESEFRVYSSANNCTFEYVLDKYFKNHTSPDVDLPPAYTNSFTRGVYYPRTFLLKYNENGTITDASRVKNLNSSRVPDTQSLLIVNNATNVVIKVGGNYNYLYRLFRKSNLKPFERDIMYSFVSEETGTLIVNFGGFNFSQILPDPSKPSKRS

SEQ ID NO: 2604 - protein, 214 aa, Artificial Sequence
  Synthetic
LACFVLAAVYRINWIGPGPGLLQYGSFCTQLNRALTGIAVEQISGINASVVNIQKEIDVVIGIVNNTVYDPLRGHLRIAGHHLGRCDLKKLLEQWNLVIGFLFLTWGPGPGTSNFRVQPTESIVRFFGEVFNATRFASVYAWNRKRISNCVADYSVLYNSASFSTFKIGNYKLNTDHSSSSDNILSYFIASFRLFARTRSMWSFNPETNILLNV

SEQ ID NO: 2605 - protein, 15 aa, Severe Acute Respiratory Syndrome coronavirus 2 (SARS-CoV-2)
GKGYHLMSFPQSAPH

SEQ ID NO: 2606 - protein, 17 aa, Severe Acute Respiratory Syndrome coronavirus 2 (SARS-CoV-2)
QTLLALHRSYLTPGDSS

SEQ ID NO: 2607 - protein, 15 aa, Severe Acute Respiratory Syndrome coronavirus 2 (SARS-CoV-2)
VLSFELLHAPATVCG

SEQ ID NO: 2608 - protein, 19 aa, Severe Acute Respiratory Syndrome coronavirus 2 (SARS-CoV-2)
QKLIANQFNSAIGKIQDSL

SEQ ID NO: 2609 - protein, 17 aa, Severe Acute Respiratory Syndrome coronavirus 2 (SARS-CoV-2)
QIPFAMQMAYRFNGIGV

SEQ ID NO: 2610 - protein, 15 aa, Severe Acute Respiratory Syndrome coronavirus 2 (SARS-CoV-2)
PKEITVATSRTLSYY

SEQ ID NO: 2611 - protein, 15 aa, Severe Acute Respiratory Syndrome coronavirus 2 (SARS-CoV-2)
PTNFTISVTTEILPV

SEQ ID NO: 2612 - protein, 17 aa, Severe Acute Respiratory Syndrome coronavirus 2 (SARS-CoV-2)
ICLLQFAYANRNRFLYI

SEQ ID NO: 2613 - protein, 16 aa, Severe Acute Respiratory Syndrome coronavirus 2 (SARS-CoV-2)
NDGVYFASTEKSNIIR

SEQ ID NO: 2614 - protein, 14 aa, Severe Acute Respiratory Syndrome coronavirus 2 (SARS-CoV-2)
TDEMIAQYTSALLA

SEQ ID NO: 2615 - protein, 19 aa, Severe Acute Respiratory Syndrome coronavirus 2 (SARS-CoV-2)
NKCVNFNFNGLTGTGVLTE

SEQ ID NO: 2616 - protein, 15 aa, Severe Acute Respiratory Syndrome coronavirus 2 (SARS-CoV-2)
DGYFKIYSKHTPINL

SEQ ID NO: 2617 - protein, 25 aa, Severe Acute Respiratory Syndrome coronavirus 2 (SARS-CoV-2)
QDLFLPFFSNVTWFHAIHVSGTNGT

SEQ ID NO: 2618 - protein, 15 aa, Severe Acute Respiratory Syndrome coronavirus 2 (SARS-CoV-2)
TGRLQSLQTYVTQQL

SEQ ID NO: 2619 - protein, 26 aa, Severe Acute Respiratory Syndrome coronavirus 2 (SARS-CoV-2)
VEGFNCYFPLQSYGFQPTNGVGYQPY

SEQ ID NO: 2620 - protein, 32 aa, Severe Acute Respiratory Syndrome coronavirus 2 (SARS-CoV-2)
FLGVYYHKNNKSWMESEFRVYSSANNCTFEYV

SEQ ID NO: 2621 - protein, 15 aa, Severe Acute Respiratory Syndrome coronavirus 2 (SARS-CoV-2)
LDKYFKNHTSPDVDL

SEQ ID NO: 2622 - protein, 14 aa, Severe Acute Respiratory Syndrome coronavirus 2 (SARS-CoV-2)
PPAYTNSFTRGVYY

SEQ ID NO: 2623 - protein, 17 aa, Severe Acute Respiratory Syndrome coronavirus 2 (SARS-CoV-2)
PRTFLLKYNENGTITDA

SEQ ID NO: 2624 - protein, 13 aa, Severe Acute Respiratory Syndrome coronavirus 2 (SARS-CoV-2)
SRVKNLNSSRVPD

SEQ ID NO: 2625 - protein, 17 aa, Severe Acute Respiratory Syndrome coronavirus 2 (SARS-CoV-2)
TQSLLIVNNATNVVIKV

SEQ ID NO: 2626 - protein, 23 aa, Severe Acute Respiratory Syndrome coronavirus 2 (SARS-CoV-2)
GGNYNYLYRLFRKSNLKPFERDI

SEQ ID NO: 2627 - protein, 15 aa, Severe Acute Respiratory Syndrome coronavirus 2 (SARS-CoV-2)
MYSFVSEETGTLIVN

SEQ ID NO: 2628 - protein, 20 aa, Severe Acute Respiratory Syndrome coronavirus 2 (SARS-CoV-2)
FGGFNFSQILPDPSKPSKRS

SEQ ID NO: 2629 - protein, 13 aa, Severe Acute Respiratory Syndrome coronavirus 2 (SARS-CoV-2)
SRVKNLNSSRVPD

SEQ ID NO: 2630 - protein, 22 aa, Severe Acute Respiratory Syndrome coronavirus 2 (SARS-CoV-2)
LLQYGSFCTQLNRALTGIAVEQ

SEQ ID NO: 2631 - protein, 15 aa, Severe Acute Respiratory Syndrome coronavirus 2 (SARS-CoV-2)
ISGINASVVNIQKEI

SEQ ID NO: 2632 - protein, 15 aa, Severe Acute Respiratory Syndrome coronavirus 2 (SARS-CoV-2)
DVVIGIVNNTVYDPL

SEQ ID NO: 2633 - protein, 15 aa, Severe Acute Respiratory Syndrome coronavirus 2 (SARS-CoV-2)
RGHLRIAGHHLGRCD

SEQ ID NO: 2634 - protein, 19 aa, Severe Acute Respiratory Syndrome coronavirus 2 (SARS-CoV-2)
LKKLLEQWNLVIGFLFLTW

SEQ ID NO: 2635 - protein, 15 aa, Severe Acute Respiratory Syndrome coronavirus 2 (SARS-CoV-2)
TSNFRVQPTESIVRF

SEQ ID NO: 2636 - protein, 41 aa, Severe Acute Respiratory Syndrome coronavirus 2 (SARS-CoV-2)
FGEVFNATRFASVYAWNRKRISNCVADYSVLYNSASFSTFK

SEQ ID NO: 2637 - protein, 17 aa, Severe Acute Respiratory Syndrome coronavirus 2 (SARS-CoV-2)
IGNYKLNTDHSSSSDNI

SEQ ID NO: 2638 - protein, 30 aa, Severe Acute Respiratory Syndrome coronavirus 2 (SARS-CoV-2)
LSYFIASFRLFARTRSMWSFNPETNILLNV

SEQ ID NO: 2639 - protein, 640 aa, Artificial Sequence
  Synthetic
GKGYHLMSFPQSAPHQTLLALHRSYLTPGDSSVLSFELLHAPATVCGQKLIANQFNSAIGKIQDSLQIPFAMQMAYRFNGIGVPKEITVATSRTLSYYPTNFTISVTTEILPVICLLQFAYANRNRFLYINDGVYFASTEKSNIIRTDEMIAQYTSALLANKCVNFNFNGLTGTGVLTEDGYFKIYSKHTPINLQDLFLPFFSNVTWFHAIHVSGTNGTTGRLQSLQTYVTQQLVEGFNCYFPLQSYGFQPTNGVGYQPYFLGVYYHKNNKSWMESEFRVYSSANNCTFEYVLDKYFKNHTSPDVDLPPAYTNSFTRGVYYPRTFLLKYNENGTITDASRVKNLNSSRVPDTQSLLIVNNATNVVIKVGGNYNYLYRLFRKSNLKPFERDIMYSFVSEETGTLIVNFGGFNFSQILPDPSKPSKRSLACFVLAAVYRINWIGPGPGLLQYGSFCTQLNRALTGIAVEQISGINASVVNIQKEIDVVIGIVNNTVYDPLRGHLRIAGHHLGRCDLKKLLEQWNLVIGFLFLTWGPGPGTSNFRVQPTESIVRFFGEVFNATRFASVYAWNRKRISNCVADYSVLYNSASFSTFKIGNYKLNTDHSSSSDNILSYFIASFRLFARTRSMWSFNPETNILLNV

SEQ ID NO: 2640 - protein, 795 aa, Artificial Sequence
  Synthetic
GKGYHLMSFPQSAPHGSGSGQTLLALHRSYLTPGDSSGSGSGVLSFELLHAPATVCGGSGSGQKLIANQFNSAIGKIQDSLGSGSGQIPFAMQMAYRFNGIGVGSGSGPKEITVATSRTLSYYGSGSGPTNFTISVTTEILPVGSGSGICLLQFAYANRNRFLYIGSGSGNDGVYFASTEKSNIIRGSGSGTDEMIAQYTSALLAGSGSGNKCVNFNFNGLTGTGVLTEGSGSGDGYFKIYSKHTPINLGSGSGQDLFLPFFSNVTWFHAIHVSGTNGTGSGSGTGRLQSLQTYVTQQLGSGSGVEGFNCYFPLQSYGFQPTNGVGYQPYGSGSGFLGVYYHKNNKSWMESEFRVYSSANNCTFEYVGSGSGLDKYFKNHTSPDVDLGSGSGPPAYTNSFTRGVYYGSGSGPRTFLLKYNENGTITDAGSGSGSRVKNLNSSRVPDGSGSGTQSLLIVNNATNVVIKVGSGSGGGNYNYLYRLFRKSNLKPFERDIGSGSGMYSFVSEETGTLIVNGSGSGFGGFNFSQILPDPSKPSKRSGSGSGLACFVLAAVYRINWIGPGPGLLQYGSFCTQLNRALTGIAVEQGSGSGISGINASVVNIQKEIGSGSGDVVIGIVNNTVYDPLGSGSGRGHLRIAGHHLGRCDGSGSGLKKLLEQWNLVIGFLFLTWGPGPGTSNFRVQPTESIVRFGSGSGFGEVFNATRFASVYAWNRKRISNCVADYSVLYNSASFSTFKGSGSGIGNYKLNTDHSSSSDNIGSGSGLSYFIASFRLFARTRSMWSFNPETNILLNV

SEQ ID NO: 2641 - protein, 293 aa, Artificial Sequence
  Synthetic
GKGYHLMSFPQSAPHQTLLALHRSYLTPGDSSVLSFELLHAPATVCGQKLIANQFNSAIGKIQDSLLKKLLEQWNLVIGFLFLTWQIPFAMQMAYRFNGIGVPKEITVATSRTLSYYPTNFTISVTTEILPVICLLQFAYANRNRFLYINDGVYFASTEKSNIIRTDEMIAQYTSALLANKCVNFNFNGLTGTGVLTEDGYFKIYSKHTPINLQDLFLPFFSNVTWFHAIHVSGTNGTTGRLQSLQTYVTQQLSSDYTIVLPVIGAIVVGLCLMGMGVYKIRLRCQSSGYQRI

SEQ ID NO: 2642 - protein, 377 aa, Artificial Sequence
  Synthetic
LACFVLAAVYRINWIVEGFNCYFPLQSYGFQPTNGVGYQPYFLGVYYHKNNKSWMESEFRVYSSANNCTFEYVLDKYFKNHTSPDVDLPPAYTNSFTRGVYYPRTFLLKYNENGTITDASRVKNLNSSRVPDTQSLLIVNNATNVVIKVGGNYNYLYRLFRKSNLKPFERDIMYSFVSEETGTLIVNFGGFNFSQILPDPSKPSKRSLLQYGSFCTQLNRALTGIAVEQISGINASVVNIQKEIDVVIGIVNNTVYDPLRGHLRIAGHHLGRCDTSNFRVQPTESIVRFFGEVFNATRFASVYAWNRKRISNCVADYSVLYNSASFSTFKIGNYKLNTDHSSSSDNILSYFIASFRLFARTRSMWSFNPETNILLNV

SEQ ID NO: 2643 - protein, 376 aa, Artificial Sequence
  Synthetic
TSNFRVQPTESIVRFGSGSGDVVIGIVNNTVYDPLGSGSGISGINASVVNIQKEIGSGSGNDGVYFASTEKSNIIRGSGSGGKGYHLMSFPQSAPHGSGSGRGHLRIAGHHLGRCDGSGSGQDLFLPFFSNVTWFHAIHVSGTNGTGSGSGLACFVLAAVYRINWIGSGSGVEGFNCYFPLQSYGFQPTNGVGYQPYGSGSGNKCVNFNFNGLTGTGVLTEGSGSGFGGFNFSQILPDPSKPSKRSGSGSGTDEMIAQYTSALLAGSGSGGGNYNYLYRLFRKSNLKPFERDIGSGSGQTLLALHRSYLTPGDSSGSGSGFLGVYYHKNNKSWMESEFRVYSSANNCTFEYVGSGSGQKLIANQFNSAIGKIQDSL

SEQ ID NO: 2644 - protein, 414 aa, Artificial Sequence
  Synthetic
PRTFLLKYNENGTITDAGSGSGVLSFELLHAPATVCGGSGSGTQSLLIVNNATNVVIKVGSGSGIGNYKLNTDHSSSSDNIGSGSGSRVKNLNSSRVPDGSGSGLLQYGSFCTQLNRALTGIAVEQGSGSGMYSFVSEETGTLIVNGSGSGPKEITVATSRTLSYYGSGSGICLLQFAYANRNRFLYIGSGSGLKKLLEQWNLVIGFLFLTWGSGSGFGEVFNATRFASVYAWNRKRISNCVADYSVLYNSASFSTFKGSGSGLDKYFKNHTSPDVDLGSGSGQIPFAMQMAYRFNGIGVGSGSGPPAYTNSFTRGVYYGSGSGDGYFKIYSKHTPINLGSGSGPTNFTISVTTEILPVGSGSGTGRLQSLQTYVTQQLGSGSGLSYFIASFRLFARTRSMWSFNPETNILLNV

SEQ ID NO: 2645 - protein, 382 aa, Artificial Sequence
  Synthetic
RGHLRIAGHHLGRCDGSGSGSGSLKKLLEQWNLVIGFLFLTWGSGSGSGSTQSLLIVNNATNVVIKVGSGSGSGSDVVIGIVNNTVYDPLGSGSGSGSIGNYKLNTDHSSSSDNIGSGSGSGSTGRLQSLQTYVTQQLGSGSGSGSDGYFKIYSKHTPINLGSGSGSGSPTNFTISVTTEILPVGSGSGSGSQIPFAMQMAYRFNGIGVGSGSGSGSSRVKNLNSSRVPDGSGSGSGSTSNFRVQPTESIVRFGSGSGSGSISGINASVVNIQKEIGSGSGSGSTDEMIAQYTSALLAGSGSGSGSFGGFNFSQILPDPSKPSKRSGSGSGSGSLACFVLAAVYRINWIGSGSGSGSQDLFLPFFSNVTWFHAIHVSGTNGT

SEQ ID NO: 2646 - protein, 504 aa, Artificial Sequence
  Synthetic
NDGVYFASTEKSNIIRGSGSGSGSNKCVNFNFNGLTGTGVLTEGSGSGSGSGGNYNYLYRLFRKSNLKPFERDIGSGSGSGSPPAYTNSFTRGVYYGSGSGSGSQTLLALHRSYLTPGDSSGSGSGSGSVLSFELLHAPATVCGGSGSGSGSFLGVYYHKNNKSWMESEFRVYSSANNCTFEYVGSGSGSGSQKLIANQFNSAIGKIQDSLGSGSGSGSLLQYGSFCTQLNRALTGIAVEQGSGSGSGSPRTFLLKYNENGTITDAGSGSGSGSVEGFNCYFPLQSYGFQPTNGVGYQPYGSGSGSGSGKGYHLMSFPQSAPHGSGSGSGSLSYFIASFRLFARTRSMWSFNPETNILLNVGSGSGSGSLDKYFKNHTSPDVDLGSGSGSGSMYSFVSEETGTLIVNGSGSGSGSFGEVFNATRFASVYAWNRKRISNCVADYSVLYNSASFSTFKGSGSGSGSPKEITVATSRTLSYYGSGSGSGSICLLQFAYANRNRFLYI

SEQ ID NO: 2647 - protein, 18 aa, Severe Acute Respiratory Syndrome coronavirus 2 (SARS-CoV-2)
NVTWFHAIHVSGTNGTKR

SEQ ID NO: 2648 - protein, 12 aa, Severe Acute Respiratory Syndrome coronavirus 2 (SARS-CoV-2)
WFHAIHVSGTNG

SEQ ID NO: 2649 - protein, 16 aa, Severe Acute Respiratory Syndrome coronavirus 2 (SARS-CoV-2)
NVTWFHAISGTNGTKR

SEQ ID NO: 2650 - protein, 10 aa, Severe Acute Respiratory Syndrome coronavirus 2 (SARS-CoV-2)
WFHAISGTNG

SEQ ID NO: 2651 - protein, 16 aa, Severe Acute Respiratory Syndrome coronavirus 2 (SARS-CoV-2)
FLGYYHKNNKSWMESE

SEQ ID NO: 2652 - protein, 10 aa, Severe Acute Respiratory Syndrome coronavirus 2 (SARS-CoV-2)
YYHKNNKSWM

SEQ ID NO: 2653 - protein, 16 aa, Severe Acute Respiratory Syndrome coronavirus 2 (SARS-CoV-2)
FLGYYHKNNKSWMESE

SEQ ID NO: 2654 - protein, 10 aa, Severe Acute Respiratory Syndrome coronavirus 2 (SARS-CoV-2)
YYHKNNKSWM

SEQ ID NO: 2655 - protein, 16 aa, Severe Acute Respiratory Syndrome coronavirus 2 (SARS-CoV-2)
GINITRFQTLLALHRS

SEQ ID NO: 2656 - protein, 12 aa, Severe Acute Respiratory Syndrome coronavirus 2 (SARS-CoV-2)
ITRFQTLLALHR

SEQ ID NO: 2657 - protein, 16 aa, Artificial Sequence
  Synthetic
GINITIFQTLLALHRS

SEQ ID NO: 2658 - protein, 12 aa, Artificial Sequence
  Synthetic
ITIFQTLLALHR

SEQ ID NO: 2659 - protein, 17 aa, Severe Acute Respiratory Syndrome coronavirus 2 (SARS-CoV-2)
VGGNYNYLYRLFRKSNL

SEQ ID NO: 2660 - protein, 11 aa, Severe Acute Respiratory Syndrome coronavirus 2 (SARS-CoV-2)
NYNYLYRLFRK

SEQ ID NO: 2661 - protein, 17 aa, Artificial Sequence
  Synthetic
VGGNYNFLYRLFRKSNL

SEQ ID NO: 2662 - protein, 11 aa, Artificial Sequence
  Synthetic
NYNFLYRLFRK

SEQ ID NO: 2663 - protein, 18 aa, Artificial Sequence
  Synthetic
VEGLNCYFPLQSYGFQPT

SEQ ID NO: 2664 - protein, 12 aa, Artificial Sequence
  Synthetic
LNCYFPLQSYGF

SEQ ID NO: 2665 - protein, 17 aa, Artificial Sequence
  Synthetic
LQSYGFQPTYGVGYQPY

SEQ ID NO: 2666 - protein, 11 aa, Artificial Sequence
  Synthetic
YGFQPTYGVGY

SEQ ID NO: 2667 - protein, 17 aa, Artificial Sequence
  Synthetic
LQSYGFQPTTGVGYQPY

SEQ ID NO: 2668 - protein, 11 aa, Artificial Sequence
  Synthetic
YGFQPTTGVGY

SEQ ID NO: 2669 - protein, 17 aa, Severe Acute Respiratory Syndrome coronavirus 2 (SARS-CoV-2)
SYQTQTNSPRRARSVAS

SEQ ID NO: 2670 - protein, 11 aa, Severe Acute Respiratory Syndrome coronavirus 2 (SARS-CoV-2)
TQTNSPRRARS

SEQ ID NO: 2671 - protein, 17 aa, Artificial Sequence
  Synthetic
SYQTQTNSHRRARSVAS

SEQ ID NO: 2672 - protein, 11 aa, Artificial Sequence
  Synthetic
TQTNSHRRARS

SEQ ID NO: 2673 - protein, 15 aa, Artificial Sequence
  Synthetic
PINFTISVTTEILPV

SEQ ID NO: 2674 - protein, 9 aa, Severe Acute Respiratory Syndrome coronavirus 2 (SARS-CoV-2)
FTISVTTEI

SEQ ID NO: 2675 - protein, 15 aa, Artificial Sequence
  Synthetic
VLSFELLHAPATVEG

SEQ ID NO: 2676 - protein, 8 aa, Severe Acute Respiratory Syndrome coronavirus 2 (SARS-CoV-2)
ELLHAPAT

SEQ ID NO: 2677 - protein, 18 aa, Severe Acute Respiratory Syndrome coronavirus 2 (SARS-CoV-2)
SIPYNSVTSSIVITSGDG

SEQ ID NO: 2678 - protein, 12 aa, Severe Acute Respiratory Syndrome coronavirus 2 (SARS-CoV-2)
YNSVTSSIVITS

SEQ ID NO: 2679 - protein, 19 aa, Severe Acute Respiratory Syndrome coronavirus 2 (SARS-CoV-2)
AKPFLNKVVSTTTNIVTRS

SEQ ID NO: 2680 - protein, 13 aa, Severe Acute Respiratory Syndrome coronavirus 2 (SARS-CoV-2)
FLNKVVSTTTNIV

SEQ ID NO: 2681 - protein, 25 aa, Severe Acute Respiratory Syndrome coronavirus 2 (SARS-CoV-2)
LGSLIYSTAALGVLMSNLGMPSYST

SEQ ID NO: 2682 - protein, 19 aa, Severe Acute Respiratory Syndrome coronavirus 2 (SARS-CoV-2)
LIYSTAALGVLMSNLGMPS

SEQ ID NO: 2683 - protein, 15 aa, Artificial Sequence
  Synthetic
MMSYKRNRATRVEST

SEQ ID NO: 2684 - protein, 9 aa, Severe Acute Respiratory Syndrome coronavirus 2 (SARS-CoV-2)
YKRNRATRV

SEQ ID NO: 2685 - protein, 15 aa, Artificial Sequence
  Synthetic
MMEYKRNRATRVEST

SEQ ID NO: 2686 - protein, 9 aa, Severe Acute Respiratory Syndrome coronavirus 2 (SARS-CoV-2)
YKRNRATRV

SEQ ID NO: 2687 - protein, 16 aa, Artificial Sequence
  Synthetic
REGYLNSTNVTIATYS

SEQ ID NO: 2688 - protein, 10 aa, Severe Acute Respiratory Syndrome coronavirus 2 (SARS-CoV-2)
YLNSTNVTIA

SEQ ID NO: 2689 - protein, 18 aa, Severe Acute Respiratory Syndrome coronavirus 2 (SARS-CoV-2)
VDAVNLLTNMFTPLIQPI

SEQ ID NO: 2690 - protein, 12 aa, Severe Acute Respiratory Syndrome coronavirus 2 (SARS-CoV-2)
VNLLTNMFTPLI

SEQ ID NO: 2691 - protein, 15 aa, Artificial Sequence
  Synthetic
NDALNNIINNARDGS

SEQ ID NO: 2692 - protein, 12 aa, Artificial Sequence
  Synthetic
LNNIINNARDGS

SEQ ID NO: 2693 - protein, 27 aa, Artificial Sequence
  Synthetic
AQSFKMFYKGVITHDVSSAINRPQIGV

SEQ ID NO: 2694 - protein, 21 aa, Severe Acute Respiratory Syndrome coronavirus 2 (SARS-CoV-2)
FKMFYKGVITHDVSSAINRPQ

SEQ ID NO: 2695 - protein, 22 aa, Artificial Sequence
  Synthetic
SSNVNRFNVAITRAKVGILSIM

SEQ ID NO: 2696 - protein, 16 aa, Severe Acute Respiratory Syndrome coronavirus 2 (SARS-CoV-2)
VNRFNVAITRAKVGIL

SEQ ID NO: 2697 - protein, 18 aa, Severe Acute Respiratory Syndrome coronavirus 2 (SARS-CoV-2)
YEDLLIRKSNHNFLVQAG

SEQ ID NO: 2698 - protein, 13 aa, Severe Acute Respiratory Syndrome coronavirus 2 (SARS-CoV-2)
LLIRKSNHNFLVQ

SEQ ID NO: 2699 - protein, 16 aa, Artificial Sequence
  Synthetic
MPNLYKMQRMLLEKDD

SEQ ID NO: 2700 - protein, 10 aa, Severe Acute Respiratory Syndrome coronavirus 2 (SARS-CoV-2)
LYKMQRMLLE

SEQ ID NO: 2701 - protein, 18 aa, Artificial Sequence
  Synthetic
LQSYGFQPTYGVGYQPYR

SEQ ID NO: 2702 - protein, 11 aa, Artificial Sequence
  Synthetic
YGFQPTYGVGY

SEQ ID NO: 2703 - protein, 18 aa, Artificial Sequence
  Synthetic
LQSYGFQPTTGVGYQPYR

SEQ ID NO: 2704 - protein, 11 aa, Artificial Sequence
  Synthetic
YGFQPTTGVGY

SEQ ID NO: 2705 - protein, 19 aa, Severe Acute Respiratory Syndrome coronavirus 2 (SARS-CoV-2)
DDQIGYYRRATRRIRGGDG

SEQ ID NO: 2706 - protein, 12 aa, Severe Acute Respiratory Syndrome coronavirus 2 (SARS-CoV-2)
IGYYRRATRRIR

SEQ ID NO: 2707 - protein, 19 aa, Artificial Sequence
  Synthetic
KEAPFLYLYALVYFLQSIN

SEQ ID NO: 2708 - protein, 12 aa, Severe Acute Respiratory Syndrome coronavirus 2 (SARS-CoV-2)
FLYLYALVYFLQ

SEQ ID NO: 2709 - protein, 19 aa, Artificial Sequence
  Synthetic
KIPYNSVTSSIVITSGDGT

SEQ ID NO: 2710 - protein, 12 aa, Severe Acute Respiratory Syndrome coronavirus 2 (SARS-CoV-2)
YNSVTSSIVITS

SEQ ID NO: 2711 - protein, 26 aa, Artificial Sequence
  Synthetic
KLGSLIYSTAALGVLMSNLGMPSYST

SEQ ID NO: 2712 - protein, 19 aa, Severe Acute Respiratory Syndrome coronavirus 2 (SARS-CoV-2)
LIYSTAALGVLMSNLGMPS

SEQ ID NO: 2713 - protein, 27 aa, Artificial Sequence
  Synthetic
KPGVYSVIYLYLTFYLTNDVSFLAHIQ

SEQ ID NO: 2714 - protein, 21 aa, Severe Acute Respiratory Syndrome coronavirus 2 (SARS-CoV-2)
VYSVIYLYLTFYLTNDVSFLA

SEQ ID NO: 2715 - protein, 22 aa, Artificial Sequence
  Synthetic
KISMWALIISVTSNYSGVVTTV

SEQ ID NO: 2716 - protein, 15 aa, Severe Acute Respiratory Syndrome coronavirus 2 (SARS-CoV-2)
WALIISVTSNYSGVV

SEQ ID NO: 2717 - protein, 20 aa, Severe Acute Respiratory Syndrome coronavirus 2 (SARS-CoV-2)
ITQMNLKYAISAKNRARTVA

SEQ ID NO: 2718 - protein, 15 aa, Severe Acute Respiratory Syndrome coronavirus 2 (SARS-CoV-2)
MNLKYAISAKNRART

SEQ ID NO: 2719 - protein, 651 aa, Artificial Sequence
  Synthetic
NSSFSRGETRCEQDLEGKGYHLMSFPQSAPHQTLLALHRSYLTPGDSSVLSFELLHAPATVCGQKLIANQFNSAIGKIQDSLLKKLLEQWNLVIGFLFLTWQIPFAMQMAYRFNGIGVPKEITVATSRTLSYYPTNFTISVTTEILPVICLLQFAYANRNRFLYINDGVYFASTEKSNIIRTDEMIAQYTSALLANKCVNFNFNGLTGTGVLTEDGYFKIYSKHTPINLQDLFLPFFSNVTWFHAIHVSGTNGTTGRLQSLQTYVTQQLGSGSGLACFVLAAVYRINWIVEGFNCYFPLQSYGFQPTNGVGYQPYFLGVYYHKNNKSWMESEFRVYSSANNCTFEYVLDKYFKNHTSPDVDLPPAYTNSFTRGVYYPRTFLLKYNENGTITDASRVKNLNSSRVPDTQSLLIVNNATNVVIKVGGNYNYLYRLFRKSNLKPFERDIMYSFVSEETGTLIVNFGGFNFSQILPDPSKPSKRSLLQYGSFCTQLNRALTGIAVEQISGINASVVNIQKEIDVVIGIVNNTVYDPLRGHLRIAGHHLGRCDTSNFRVQPTESIVRFFGEVFNATRFASVYAWNRKRISNCVADYSVLYNSASFSTFKIGNYKLNTDHSSSSDNILSYFIASFRLFARTRSMWSFNPETNILLNV

SEQ ID NO: 2720 - protein, 910 aa, Artificial Sequence
  Synthetic
NSSFSRGETRCEQDLERGHLRIAGHHLGRCDGSGSGSGSLKKLLEQWNLVIGFLFLTWGSGSGSGSTQSLLIVNNATNVVIKVGSGSGSGSDVVIGIVNNTVYDPLGSGSGSGSIGNYKLNTDHSSSSDNIGSGSGSGSTGRLQSLQTYVTQQLGSGSGSGSDGYFKIYSKHTPINLGSGSGSGSPTNFTISVTTEILPVGSGSGSGSQIPFAMQMAYRFNGIGVGSGSGSGSSRVKNLNSSRVPDGSGSGSGSTSNFRVQPTESIVRFGSGSGSGSISGINASVVNIQKEIGSGSGSGSTDEMIAQYTSALLAGSGSGSGSFGGFNFSQILPDPSKPSKRSGSGSGSGSLACFVLAAVYRINWIGSGSGSGSQDLFLPFFSNVTWFHAIHVSGTNGTGSGSGSGSNDGVYFASTEKSNIIRGSGSGSGSNKCVNFNFNGLTGTGVLTEGSGSGSGSGGNYNYLYRLFRKSNLKPFERDIGSGSGSGSPPAYTNSFTRGVYYGSGSGSGSQTLLALHRSYLTPGDSSGSGSGSGSVLSFELLHAPATVCGGSGSGSGSFLGVYYHKNNKSWMESEFRVYSSANNCTFEYVGSGSGSGSQKLIANQFNSAIGKIQDSLGSGSGSGSLLQYGSFCTQLNRALTGIAVEQGSGSGSGSPRTFLLKYNENGTITDAGSGSGSGSVEGFNCYFPLQSYGFQPTNGVGYQPYGSGSGSGSGKGYHLMSFPQSAPHGSGSGSGSLSYFIASFRLFARTRSMWSFNPETNILLNVGSGSGSGSLDKYFKNHTSPDVDLGSGSGSGSMYSFVSEETGTLIVNGSGSGSGSFGEVFNATRFASVYAWNRKRISNCVADYSVLYNSASFSTFKGSGSGSGSPKEITVATSRTLSYYGSGSGSGSICLLQFAYANRNRFLYI

SEQ ID NO: 2721 - protein, 646 aa, Artificial Sequence
  Synthetic
NSSFSRGETRCEQDLEGKGYHLMSFPQSAPHQTLLALHRSYLTPGDSSVLSFELLHAPATVCGQKLIANQFNSAIGKIQDSLQIPFAMQMAYRFNGIGVPKEITVATSRTLSYYPTNFTISVTTEILPVICLLQFAYANRNRFLYINDGVYFASTEKSNIIRTDEMIAQYTSALLANKCVNFNFNGLTGTGVLTEDGYFKIYSKHTPINLQDLFLPFFSNVTWFHAIHVSGTNGTTGRLQSLQTYVTQQLVEGFNCYFPLQSYGFQPTNGVGYQPYFLGVYYHKNNKSWMESEFRVYSSANNCTFEYVLDKYFKNHTSPDVDLPPAYTNSFTRGVYYPRTFLLKYNENGTITDASRVKNLNSSRVPDTQSLLIVNNATNVVIKVGGNYNYLYRLFRKSNLKPFERDIMYSFVSEETGTLIVNFGGFNFSQILPDPSKPSKRSLACFVLAAVYRINWILLQYGSFCTQLNRALTGIAVEQISGINASVVNIQKEIDVVIGIVNNTVYDPLRGHLRIAGHHLGRCDLKKLLEQWNLVIGFLFLTWTSNFRVQPTESIVRFFGEVFNATRFASVYAWNRKRISNCVADYSVLYNSASFSTFKIGNYKLNTDHSSSSDNILSYFIASFRLFARTRSMWSFNPETNILLNV

SEQ ID NO: 2722 - protein, 656 aa, Artificial Sequence
  Synthetic
NSSFSRGETRCEQDLEGKGYHLMSFPQSAPHQTLLALHRSYLTPGDSSVLSFELLHAPATVCGQKLIANQFNSAIGKIQDSLQIPFAMQMAYRFNGIGVPKEITVATSRTLSYYPTNFTISVTTEILPVICLLQFAYANRNRFLYINDGVYFASTEKSNIIRTDEMIAQYTSALLANKCVNFNFNGLTGTGVLTEDGYFKIYSKHTPINLQDLFLPFFSNVTWFHAIHVSGTNGTTGRLQSLQTYVTQQLVEGFNCYFPLQSYGFQPTNGVGYQPYFLGVYYHKNNKSWMESEFRVYSSANNCTFEYVLDKYFKNHTSPDVDLPPAYTNSFTRGVYYPRTFLLKYNENGTITDASRVKNLNSSRVPDTQSLLIVNNATNVVIKVGGNYNYLYRLFRKSNLKPFERDIMYSFVSEETGTLIVNFGGFNFSQILPDPSKPSKRSLACFVLAAVYRINWIGPGPGLLQYGSFCTQLNRALTGIAVEQISGINASVVNIQKEIDVVIGIVNNTVYDPLRGHLRIAGHHLGRCDLKKLLEQWNLVIGFLFLTWGPGPGTSNFRVQPTESIVRFFGEVFNATRFASVYAWNRKRISNCVADYSVLYNSASFSTFKIGNYKLNTDHSSSSDNILSYFIASFRLFARTRSMWSFNPETNILLNV

SEQ ID NO: 2723 - protein, 129 aa, Artificial Sequence
  Synthetic
FLGVYYHKNNKSWMESEGSGSGTSNFRVQPTESIVRFLDKYFKNHTSPDVDLNKCVNFNFNGLTGTVEGFNCYFPLQSYGFQPTGPGPGSSDYTIVLPVIGAIVVGLCLMGMGVYKIRLRCQSSGYQRI

SEQ ID NO: 2724 - protein, 129 aa, Artificial Sequence
  Synthetic
ESEFRVYSSANNCTFEYVPPAYTNSFTRGVYYTGRLQSLQTYVTQQLFGGFNFSQILPDPSKPSKRSLQSYGFQPTNGVGYQPYGPGPGSSDYTIVLPVIGAIVVGLCLMGMGVYKIRLRCQSSGYQRI

SEQ ID NO: 2725 - protein, 137 aa, Artificial Sequence
  Synthetic
PRTFLLKYNENGTITDAQTLLALHRSYLTPGDSSGGNYNYLYRLFRKSNLKPFERDIFLGVYYHKNNKSWMESEESEFRVYSSANNCTFEYVGPGPGSSDYTIVLPVIGAIVVGLCLMGMGVYKIRLRCQSSGYQRI

SEQ ID NO: 2726 - protein, 124 aa, Artificial Sequence
  Synthetic
FLGVYYHKNNKSWMESEGSGSGTSNFRVQPTESIVRFLDKYFKNHTSPDVDLNKCVNFNFNGLTGTVEGFNCYFPLQSYGFQPTSSDYTIVLPVIGAIVVGLCLMGMGVYKIRLRCQSSGYQRI

SEQ ID NO: 2727 - protein, 124 aa, Artificial Sequence
  Synthetic
ESEFRVYSSANNCTFEYVPPAYTNSFTRGVYYTGRLQSLQTYVTQQLFGGFNFSQILPDPSKPSKRSLQSYGFQPTNGVGYQPYSSDYTIVLPVIGAIVVGLCLMGMGVYKIRLRCQSSGYQRI

SEQ ID NO: 2728 - protein, 132 aa, Artificial Sequence
  Synthetic
PRTFLLKYNENGTITDAQTLLALHRSYLTPGDSSGGNYNYLYRLFRKSNLKPFERDIFLGVYYHKNNKSWMESEESEFRVYSSANNCTFEYVSSDYTIVLPVIGAIVVGLCLMGMGVYKIRLRCQSSGYQRI

SEQ ID NO: 2729 - protein, 158 aa, Artificial Sequence
  Synthetic
MAAPGSARRPLLLLLLLLLLGLMHCASAAFLGVYYHKNNKSWMESEGSGSGTSNFRVQPTESIVRFLDKYFKNHTSPDVDLNKCVNFNFNGLTGTVEGFNCYFPLQSYGFQPTGPGPGSSDYTIVLPVIGAIVVGLCLMGMGVYKIRLRCQSSGYQRI

SEQ ID NO: 2730 - protein, 158 aa, Artificial Sequence
  Synthetic
MAAPGSARRPLLLLLLLLLLGLMHCASAAESEFRVYSSANNCTFEYVPPAYTNSFTRGVYYTGRLQSLQTYVTQQLFGGFNFSQILPDPSKPSKRSLQSYGFQPTNGVGYQPYGPGPGSSDYTIVLPVIGAIVVGLCLMGMGVYKIRLRCQSSGYQRI

SEQ ID NO: 2731 - protein, 166 aa, Artificial Sequence
  Synthetic
MAAPGSARRPLLLLLLLLLLGLMHCASAAPRTFLLKYNENGTITDAQTLLALHRSYLTPGDSSGGNYNYLYRLFRKSNLKPFERDIFLGVYYHKNNKSWMESEESEFRVYSSANNCTFEYVGPGPGSSDYTIVLPVIGAIVVGLCLMGMGVYKIRLRCQSSGYQRI

SEQ ID NO: 2732 - protein, 714 aa, Artificial Sequence
  Synthetic
MAAPGSARRPLLLLLLLLLLGLMHCASAAGKGYHLMSFPQSAPHQTLLALHRSYLTPGDSSVLSFELLHAPATVCGQKLIANQFNSAIGKIQDSLQIPFAMQMAYRFNGIGVPKEITVATSRTLSYYPTNFTISVTTEILPVICLLQFAYANRNRFLYINDGVYFASTEKSNIIRTDEMIAQYTSALLANKCVNFNFNGLTGTGVLTEDGYFKIYSKHTPINLQDLFLPFFSNVTWFHAIHVSGTNGTTGRLQSLQTYVTQQLVEGFNCYFPLQSYGFQPTNGVGYQPYFLGVYYHKNNKSWMESEFRVYSSANNCTFEYVLDKYFKNHTSPDVDLPPAYTNSFTRGVYYPRTFLLKYNENGTITDASRVKNLNSSRVPDTQSLLIVNNATNVVIKVGGNYNYLYRLFRKSNLKPFERDIMYSFVSEETGTLIVNFGGFNFSQILPDPSKPSKRSLACFVLAAVYRINWIGPGPGLLQYGSFCTQLNRALTGIAVEQISGINASVVNIQKEIDVVIGIVNNTVYDPLRGHLRIAGHHLGRCDLKKLLEQWNLVIGFLFLTWGPGPGTSNFRVQPTESIVRFFGEVFNATRFASVYAWNRKRISNCVADYSVLYNSASFSTFKIGNYKLNTDHSSSSDNILSYFIASFRLFARTRSMWSFNPETNILLNVGPGPGSSDYTIVLPVIGAIVVGLCLMGMGVYKIRLRCQSSGYQRI

SEQ ID NO: 2733 - protein, 395 aa, Artificial Sequence
  Synthetic
MAAPGSARRPLLLLLLLLLLGLMHCASAAGKGYHLMSFPQSAPHQTLLALHRSYLTPGDSSVLSFELLHAPATVCGQKLIANQFNSAIGKIQDSLQIPFAMQMAYRFNGIGVPKEITVATSRTLSYYPTNFTISVTTEILPVICLLQFAYANRNRFLYINDGVYFASTEKSNIIRTDEMIAQYTSALLANKCVNFNFNGLTGTGVLTEDGYFKIYSKHTPINLQDLFLPFFSNVTWFHAIHVSGTNGTTGRLQSLQTYVTQQLVEGFNCYFPLQSYGFQPTNGVGYQPYFLGVYYHKNNKSWMESEFRVYSSANNCTFEYVLDKYFKNHTSPDVDLPPAYTNSFTRGVYYGPGPGSSDYTIVLPVIGAIVVGLCLMGMGVYKIRLRCQSSGYQRI

SEQ ID NO: 2734 - protein, 392 aa, Artificial Sequence
  Synthetic
MAAPGSARRPLLLLLLLLLLGLMHCASAAPRTFLLKYNENGTITDASRVKNLNSSRVPDTQSLLIVNNATNVVIKVGGNYNYLYRLFRKSNLKPFERDIMYSFVSEETGTLIVNFGGFNFSQILPDPSKPSKRSLACFVLAAVYRINWIGPGPGLLQYGSFCTQLNRALTGIAVEQISGINASVVNIQKEIDVVIGIVNNTVYDPLRGHLRIAGHHLGRCDLKKLLEQWNLVIGFLFLTWGPGPGTSNFRVQPTESIVRFFGEVFNATRFASVYAWNRKRISNCVADYSVLYNSASFSTFKIGNYKLNTDHSSSSDNILSYFIASFRLFARTRSMWSFNPETNILLNVGPGPGSSDYTIVLPVIGAIVVGLCLMGMGVYKIRLRCQSSGYQR

SEQ ID NO: 2735 - protein, 9 aa, Severe acute respiratory syndrome coronavirus 2
MYSFVSEET

SEQ ID NO: 2736 - protein, 10 aa, Severe acute respiratory syndrome coronavirus 2
MYSFVSEETG

SEQ ID NO: 2737 - protein, 10 aa, Severe acute respiratory syndrome coronavirus 2
SFVSEETGTL

SEQ ID NO: 2738 - protein, 9 aa, Severe acute respiratory syndrome coronavirus 2
FVSEETGTL

SEQ ID NO: 2739 - protein, 10 aa, Severe acute respiratory syndrome coronavirus 2
FVSEETGTLI

SEQ ID NO: 2740 - protein, 9 aa, Severe acute respiratory syndrome coronavirus 2
VSEETGTLI

SEQ ID NO: 2741 - protein, 10 aa, Severe acute respiratory syndrome coronavirus 2
VSEETGTLIV

SEQ ID NO: 2742 - protein, 9 aa, Severe acute respiratory syndrome coronavirus 2
SEETGTLIV

SEQ ID NO: 2743 - protein, 9 aa, Severe acute respiratory syndrome coronavirus 2
EETGTLIVN

SEQ ID NO: 2744 - protein, 10 aa, Severe acute respiratory syndrome coronavirus 2
TGTLIVNSVL

SEQ ID NO: 2745 - protein, 9 aa, Severe acute respiratory syndrome coronavirus 2
TLIVNSVLL

SEQ ID NO: 2746 - protein, 10 aa, Severe acute respiratory syndrome coronavirus 2
LIVNSVLLFL

SEQ ID NO: 2747 - protein, 10 aa, Severe acute respiratory syndrome coronavirus 2
IVNSVLLFLA

SEQ ID NO: 2748 - protein, 10 aa, Severe acute respiratory syndrome coronavirus 2
VNSVLLFLAF

SEQ ID NO: 2749 - protein, 10 aa, Severe acute respiratory syndrome coronavirus 2
SVLLFLAFVV

SEQ ID NO: 2750 - protein, 10 aa, Severe acute respiratory syndrome coronavirus 2
VLLFLAFVVF

SEQ ID NO: 2751 - protein, 9 aa, Severe acute respiratory syndrome coronavirus 2
LLFLAFVVF

SEQ ID NO: 2752 - protein, 10 aa, Severe acute respiratory syndrome coronavirus 2
LLFLAFVVFL

SEQ ID NO: 2753 - protein, 9 aa, Severe acute respiratory syndrome coronavirus 2
LFLAFVVFL

SEQ ID NO: 2754 - protein, 10 aa, Severe acute respiratory syndrome coronavirus 2
LFLAFVVFLL

SEQ ID NO: 2755 - protein, 10 aa, Severe acute respiratory syndrome coronavirus 2
FLAFVVFLLV

SEQ ID NO: 2756 - protein, 10 aa, Severe acute respiratory syndrome coronavirus 2
LAFVVFLLVT

SEQ ID NO: 2757 - protein, 10 aa, Severe acute respiratory syndrome coronavirus 2
AFVVFLLVTL

SEQ ID NO: 2758 - protein, 10 aa, Severe acute respiratory syndrome coronavirus 2
FVVFLLVTLA

SEQ ID NO: 2759 - protein, 9 aa, Severe acute respiratory syndrome coronavirus 2
VFLLVTLAI

SEQ ID NO: 2760 - protein, 10 aa, Severe acute respiratory syndrome coronavirus 2
VFLLVTLAIL

SEQ ID NO: 2761 - protein, 9 aa, Severe acute respiratory syndrome coronavirus 2
FLLVTLAIL

SEQ ID NO: 2762 - protein, 10 aa, Severe acute respiratory syndrome coronavirus 2
FLLVTLAILT

SEQ ID NO: 2763 - protein, 10 aa, Severe acute respiratory syndrome coronavirus 2
LLVTLAILTA

SEQ ID NO: 2764 - protein, 10 aa, Severe acute respiratory syndrome coronavirus 2
LVTLAILTAL

SEQ ID NO: 2765 - protein, 10 aa, Severe acute respiratory syndrome coronavirus 2
VTLAILTALR

SEQ ID NO: 2766 - protein, 9 aa, Severe acute respiratory syndrome coronavirus 2
TLAILTALR

SEQ ID NO: 2767 - protein, 10 aa, Severe acute respiratory syndrome coronavirus 2
TLAILTALRL

SEQ ID NO: 2768 - protein, 10 aa, Severe acute respiratory syndrome coronavirus 2
AILTALRLCA

SEQ ID NO: 2769 - protein, 9 aa, Severe acute respiratory syndrome coronavirus 2
ILTALRLCA

SEQ ID NO: 2770 - protein, 10 aa, Severe acute respiratory syndrome coronavirus 2
ILTALRLCAY

SEQ ID NO: 2771 - protein, 9 aa, Severe acute respiratory syndrome coronavirus 2
LTALRLCAY

SEQ ID NO: 2772 - protein, 10 aa, Severe acute respiratory syndrome coronavirus 2
ALRLCAYCCN

SEQ ID NO: 2773 - protein, 10 aa, Severe acute respiratory syndrome coronavirus 2
LRLCAYCCNI

SEQ ID NO: 2774 - protein, 9 aa, Severe acute respiratory syndrome coronavirus 2
RLCAYCCNI

SEQ ID NO: 2775 - protein, 10 aa, Severe acute respiratory syndrome coronavirus 2
RLCAYCCNIV

SEQ ID NO: 2776 - protein, 10 aa, Severe acute respiratory syndrome coronavirus 2
AYCCNIVNVS

SEQ ID NO: 2777 - protein, 10 aa, Severe acute respiratory syndrome coronavirus 2
YCCNIVNVSL

SEQ ID NO: 2778 - protein, 9 aa, Severe acute respiratory syndrome coronavirus 2
CCNIVNVSL

SEQ ID NO: 2779 - protein, 10 aa, Severe acute respiratory syndrome coronavirus 2
NVSLVKPSFY

SEQ ID NO: 2780 - protein, 9 aa, Severe acute respiratory syndrome coronavirus 2
VSLVKPSFY

SEQ ID NO: 2781 - protein, 10 aa, Severe acute respiratory syndrome coronavirus 2
VSLVKPSFYV

SEQ ID NO: 2782 - protein, 9 aa, Severe acute respiratory syndrome coronavirus 2
SLVKPSFYV

SEQ ID NO: 2783 - protein, 10 aa, Severe acute respiratory syndrome coronavirus 2
SLVKPSFYVY

SEQ ID NO: 2784 - protein, 9 aa, Severe acute respiratory syndrome coronavirus 2
LVKPSFYVY

SEQ ID NO: 2785 - protein, 10 aa, Severe acute respiratory syndrome coronavirus 2
KPSFYVYSRV

SEQ ID NO: 2786 - protein, 10 aa, Severe acute respiratory syndrome coronavirus 2
PSFYVYSRVK

SEQ ID NO: 2787 - protein, 9 aa, Severe acute respiratory syndrome coronavirus 2
SFYVYSRVK

SEQ ID NO: 2788 - protein, 10 aa, Severe acute respiratory syndrome coronavirus 2
FYVYSRVKNL

SEQ ID NO: 2789 - protein, 9 aa, Severe acute respiratory syndrome coronavirus 2
YVYSRVKNL

SEQ ID NO: 2790 - protein, 9 aa, Severe acute respiratory syndrome coronavirus 2
VYSRVKNLN

SEQ ID NO: 2791 - protein, 9 aa, Severe acute respiratory syndrome coronavirus 2
RVKNLNSSR

SEQ ID NO: 2792 - protein, 9 aa, Severe acute respiratory syndrome coronavirus 2
NSSRVPDLL

SEQ ID NO: 2793 - protein, 10 aa, Severe acute respiratory syndrome coronavirus 2
MADSNGTITV

SEQ ID NO: 2794 - protein, 9 aa, Severe acute respiratory syndrome coronavirus 2
GTITVEELK

SEQ ID NO: 2795 - protein, 10 aa, Severe acute respiratory syndrome coronavirus 2
GTITVEELKK

SEQ ID NO: 2796 - protein, 10 aa, Severe acute respiratory syndrome coronavirus 2
TVEELKKLLE

SEQ ID NO: 2797 - protein, 10 aa, Severe acute respiratory syndrome coronavirus 2
VEELKKLLEQ

SEQ ID NO: 2798 - protein, 10 aa, Severe acute respiratory syndrome coronavirus 2
EELKKLLEQW

SEQ ID NO: 2799 - protein, 9 aa, Severe acute respiratory syndrome coronavirus 2
ELKKLLEQW

SEQ ID NO: 2800 - protein, 9 aa, Severe acute respiratory syndrome coronavirus 2
KKLLEQWNL

SEQ ID NO: 2801 - protein, 9 aa, Severe acute respiratory syndrome coronavirus 2
KLLEQWNLV

SEQ ID NO: 2802 - protein, 10 aa, Severe acute respiratory syndrome coronavirus 2
KLLEQWNLVI

SEQ ID NO: 2803 - protein, 9 aa, Severe acute respiratory syndrome coronavirus 2
LLEQWNLVI

SEQ ID NO: 2804 - protein, 10 aa, Severe acute respiratory syndrome coronavirus 2
LLEQWNLVIG

SEQ ID NO: 2805 - protein, 10 aa, Severe acute respiratory syndrome coronavirus 2
LEQWNLVIGF

SEQ ID NO: 2806 - protein, 9 aa, Severe acute respiratory syndrome coronavirus 2
EQWNLVIGF

SEQ ID NO: 2807 - protein, 10 aa, Severe acute respiratory syndrome coronavirus 2
EQWNLVIGFL

SEQ ID NO: 2808 - protein, 9 aa, Severe acute respiratory syndrome coronavirus 2
QWNLVIGFL

SEQ ID NO: 2809 - protein, 10 aa, Severe acute respiratory syndrome coronavirus 2
QWNLVIGFLF

SEQ ID NO: 2810 - protein, 10 aa, Severe acute respiratory syndrome coronavirus 2
WNLVIGFLFL

SEQ ID NO: 2811 - protein, 9 aa, Severe acute respiratory syndrome coronavirus 2
NLVIGFLFL

SEQ ID NO: 2812 - protein, 10 aa, Severe acute respiratory syndrome coronavirus 2
NLVIGFLFLT

SEQ ID NO: 2813 - protein, 10 aa, Severe acute respiratory syndrome coronavirus 2
LVIGFLFLTW

SEQ ID NO: 2814 - protein, 10 aa, Severe acute respiratory syndrome coronavirus 2
VIGFLFLTWI

SEQ ID NO: 2815 - protein, 10 aa, Severe acute respiratory syndrome coronavirus 2
GFLFLTWICL

SEQ ID NO: 2816 - protein, 9 aa, Severe acute respiratory syndrome coronavirus 2
FLFLTWICL

SEQ ID NO: 2817 - protein, 10 aa, Severe acute respiratory syndrome coronavirus 2
FLFLTWICLL

SEQ ID NO: 2818 - protein, 9 aa, Severe acute respiratory syndrome coronavirus 2
LFLTWICLL

SEQ ID NO: 2819 - protein, 10 aa, Severe acute respiratory syndrome coronavirus 2
LFLTWICLLQ

SEQ ID NO: 2820 - protein, 9 aa, Severe acute respiratory syndrome coronavirus 2
FLTWICLLQ

SEQ ID NO: 2821 - protein, 10 aa, Severe acute respiratory syndrome coronavirus 2
FLTWICLLQF

SEQ ID NO: 2822 - protein, 9 aa, Severe acute respiratory syndrome coronavirus 2
LTWICLLQF

SEQ ID NO: 2823 - protein, 10 aa, Severe acute respiratory syndrome coronavirus 2
LTWICLLQFA

SEQ ID NO: 2824 - protein, 9 aa, Severe acute respiratory syndrome coronavirus 2
TWICLLQFA

SEQ ID NO: 2825 - protein, 10 aa, Severe acute respiratory syndrome coronavirus 2
TWICLLQFAY

SEQ ID NO: 2826 - protein, 9 aa, Severe acute respiratory syndrome coronavirus 2
WICLLQFAY

SEQ ID NO: 2827 - protein, 10 aa, Severe acute respiratory syndrome coronavirus 2
WICLLQFAYA

SEQ ID NO: 2828 - protein, 10 aa, Severe acute respiratory syndrome coronavirus 2
CLLQFAYANR

SEQ ID NO: 2829 - protein, 10 aa, Severe acute respiratory syndrome coronavirus 2
QFAYANRNRF

SEQ ID NO: 2830 - protein, 9 aa, Severe acute respiratory syndrome coronavirus 2
FAYANRNRF

SEQ ID NO: 2831 - protein, 10 aa, Severe acute respiratory syndrome coronavirus 2
FAYANRNRFL

SEQ ID NO: 2832 - protein, 9 aa, Severe acute respiratory syndrome coronavirus 2
AYANRNRFL

SEQ ID NO: 2833 - protein, 10 aa, Severe acute respiratory syndrome coronavirus 2
AYANRNRFLY

SEQ ID NO: 2834 - protein, 9 aa, Severe acute respiratory syndrome coronavirus 2
YANRNRFLY

SEQ ID NO: 2835 - protein, 10 aa, Severe acute respiratory syndrome coronavirus 2
NRNRFLYIIK

SEQ ID NO: 2836 - protein, 9 aa, Severe acute respiratory syndrome coronavirus 2
NRFLYIIKL

SEQ ID NO: 2837 - protein, 9 aa, Severe acute respiratory syndrome coronavirus 2
RFLYIIKLI

SEQ ID NO: 2838 - protein, 10 aa, Severe acute respiratory syndrome coronavirus 2
RFLYIIKLIF

SEQ ID NO: 2839 - protein, 10 aa, Severe acute respiratory syndrome coronavirus 2
FLYIIKLIFL

SEQ ID NO: 2840 - protein, 9 aa, Severe acute respiratory syndrome coronavirus 2
LYIIKLIFL

SEQ ID NO: 2841 - protein, 10 aa, Severe acute respiratory syndrome coronavirus 2
LYIIKLIFLW

SEQ ID NO: 2842 - protein, 9 aa, Severe acute respiratory syndrome coronavirus 2
YIIKLIFLW

SEQ ID NO: 2843 - protein, 10 aa, Severe acute respiratory syndrome coronavirus 2
YIIKLIFLWL

SEQ ID NO: 2844 - protein, 9 aa, Severe acute respiratory syndrome coronavirus 2
IIKLIFLWL

SEQ ID NO: 2845 - protein, 10 aa, Severe acute respiratory syndrome coronavirus 2
IIKLIFLWLL

SEQ ID NO: 2846 - protein, 10 aa, Severe acute respiratory syndrome coronavirus 2
IKLIFLWLLW

SEQ ID NO: 2847 - protein, 9 aa, Severe acute respiratory syndrome coronavirus 2
KLIFLWLLW

SEQ ID NO: 2848 - protein, 10 aa, Severe acute respiratory syndrome coronavirus 2
KLIFLWLLWP

SEQ ID NO: 2849 - protein, 10 aa, Severe acute respiratory syndrome coronavirus 2
LIFLWLLWPV

SEQ ID NO: 2850 - protein, 9 aa, Severe acute respiratory syndrome coronavirus 2
IFLWLLWPV

SEQ ID NO: 2851 - protein, 9 aa, Severe acute respiratory syndrome coronavirus 2
FLWLLWPVT

SEQ ID NO: 2852 - protein, 10 aa, Severe acute respiratory syndrome coronavirus 2
FLWLLWPVTL

SEQ ID NO: 2853 - protein, 9 aa, Severe acute respiratory syndrome coronavirus 2
LWLLWPVTL

SEQ ID NO: 2854 - protein, 10 aa, Severe acute respiratory syndrome coronavirus 2
LWLLWPVTLA

SEQ ID NO: 2855 - protein, 9 aa, Severe acute respiratory syndrome coronavirus 2
WLLWPVTLA

SEQ ID NO: 2856 - protein, 10 aa, Severe acute respiratory syndrome coronavirus 2
WLLWPVTLAC

SEQ ID NO: 2857 - protein, 9 aa, Severe acute respiratory syndrome coronavirus 2
LLWPVTLAC

SEQ ID NO: 2858 - protein, 10 aa, Severe acute respiratory syndrome coronavirus 2
LLWPVTLACF

SEQ ID NO: 2859 - protein, 9 aa, Severe acute respiratory syndrome coronavirus 2
LWPVTLACF

SEQ ID NO: 2860 - protein, 10 aa, Severe acute respiratory syndrome coronavirus 2
LWPVTLACFV

SEQ ID NO: 2861 - protein, 10 aa, Severe acute respiratory syndrome coronavirus 2
WPVTLACFVL

SEQ ID NO: 2862 - protein, 9 aa, Severe acute respiratory syndrome coronavirus 2
VTLACFVLA

SEQ ID NO: 2863 - protein, 10 aa, Severe acute respiratory syndrome coronavirus 2
VTLACFVLAA

SEQ ID NO: 2864 - protein, 9 aa, Severe acute respiratory syndrome coronavirus 2
TLACFVLAA

SEQ ID NO: 2865 - protein, 10 aa, Severe acute respiratory syndrome coronavirus 2
TLACFVLAAV

SEQ ID NO: 2866 - protein, 10 aa, Severe acute respiratory syndrome coronavirus 2
CFVLAAVYRI

SEQ ID NO: 2867 - protein, 9 aa, Severe acute respiratory syndrome coronavirus 2
FVLAAVYRI

SEQ ID NO: 2868 - protein, 9 aa, Severe acute respiratory syndrome coronavirus 2
AVYRINWIT

SEQ ID NO: 2869 - protein, 10 aa, Severe acute respiratory syndrome coronavirus 2
VYRINWITGG

SEQ ID NO: 2870 - protein, 10 aa, Severe acute respiratory syndrome coronavirus 2
YRINWITGGI

SEQ ID NO: 2871 - protein, 9 aa, Severe acute respiratory syndrome coronavirus 2
RINWITGGI

SEQ ID NO: 2872 - protein, 10 aa, Severe acute respiratory syndrome coronavirus 2
RINWITGGIA

SEQ ID NO: 2873 - protein, 9 aa, Severe acute respiratory syndrome coronavirus 2
NWITGGIAI

SEQ ID NO: 2874 - protein, 9 aa, Severe acute respiratory syndrome coronavirus 2
WITGGIAIA

SEQ ID NO: 2875 - protein, 9 aa, Severe acute respiratory syndrome coronavirus 2
GIAIAMACL

SEQ ID NO: 2876 - protein, 10 aa, Severe acute respiratory syndrome coronavirus 2
GIAIAMACLV

SEQ ID NO: 2877 - protein, 10 aa, Severe acute respiratory syndrome coronavirus 2
AIAMACLVGL

SEQ ID NO: 2878 - protein, 9 aa, Severe acute respiratory syndrome coronavirus 2
IAMACLVGL

SEQ ID NO: 2879 - protein, 9 aa, Severe acute respiratory syndrome coronavirus 2
AMACLVGLM

SEQ ID NO: 2880 - protein, 10 aa, Severe acute respiratory syndrome coronavirus 2
AMACLVGLMW

SEQ ID NO: 2881 - protein, 9 aa, Severe acute respiratory syndrome coronavirus 2
MACLVGLMW

SEQ ID NO: 2882 - protein, 10 aa, Severe acute respiratory syndrome coronavirus 2
MACLVGLMWL

SEQ ID NO: 2883 - protein, 9 aa, Severe acute respiratory syndrome coronavirus 2
CLVGLMWLS

SEQ ID NO: 2884 - protein, 10 aa, Severe acute respiratory syndrome coronavirus 2
CLVGLMWLSY

SEQ ID NO: 2885 - protein, 9 aa, Severe acute respiratory syndrome coronavirus 2
LVGLMWLSY

SEQ ID NO: 2886 - protein, 10 aa, Severe acute respiratory syndrome coronavirus 2
LVGLMWLSYF

SEQ ID NO: 2887 - protein, 9 aa, Severe acute respiratory syndrome coronavirus 2
VGLMWLSYF

SEQ ID NO: 2888 - protein, 10 aa, Severe acute respiratory syndrome coronavirus 2
VGLMWLSYFI

SEQ ID NO: 2889 - protein, 9 aa, Severe acute respiratory syndrome coronavirus 2
GLMWLSYFI

SEQ ID NO: 2890 - protein, 10 aa, Severe acute respiratory syndrome coronavirus 2
GLMWLSYFIA

SEQ ID NO: 2891 - protein, 9 aa, Severe acute respiratory syndrome coronavirus 2
LMWLSYFIA

SEQ ID NO: 2892 - protein, 10 aa, Severe acute respiratory syndrome coronavirus 2
MWLSYFIASF

SEQ ID NO: 2893 - protein, 9 aa, Severe acute respiratory syndrome coronavirus 2
WLSYFIASF

SEQ ID NO: 2894 - protein, 10 aa, Severe acute respiratory syndrome coronavirus 2
WLSYFIASFR

SEQ ID NO: 2895 - protein, 9 aa, Severe acute respiratory syndrome coronavirus 2
LSYFIASFR

SEQ ID NO: 2896 - protein, 10 aa, Severe acute respiratory syndrome coronavirus 2
LSYFIASFRL

SEQ ID NO: 2897 - protein, 9 aa, Severe acute respiratory syndrome coronavirus 2
SYFIASFRL

SEQ ID NO: 2898 - protein, 10 aa, Severe acute respiratory syndrome coronavirus 2
SYFIASFRLF

SEQ ID NO: 2899 - protein, 9 aa, Severe acute respiratory syndrome coronavirus 2
YFIASFRLF

SEQ ID NO: 2900 - protein, 10 aa, Severe acute respiratory syndrome coronavirus 2
YFIASFRLFA

SEQ ID NO: 2901 - protein, 9 aa, Severe acute respiratory syndrome coronavirus 2
FIASFRLFA

SEQ ID NO: 2902 - protein, 10 aa, Severe acute respiratory syndrome coronavirus 2
FIASFRLFAR

SEQ ID NO: 2903 - protein, 10 aa, Severe acute respiratory syndrome coronavirus 2
FRLFARTRSM

SEQ ID NO: 2904 - protein, 10 aa, Severe acute respiratory syndrome coronavirus 2
RLFARTRSMW

SEQ ID NO: 2905 - protein, 9 aa, Severe acute respiratory syndrome coronavirus 2
LFARTRSMW

SEQ ID NO: 2906 - protein, 10 aa, Severe acute respiratory syndrome coronavirus 2
FARTRSMWSF

SEQ ID NO: 2907 - protein, 9 aa, Severe acute respiratory syndrome coronavirus 2
ARTRSMWSF

SEQ ID NO: 2908 - protein, 9 aa, Severe acute respiratory syndrome coronavirus 2
RTRSMWSFN

SEQ ID NO: 2909 - protein, 10 aa, Severe acute respiratory syndrome coronavirus 2
RTRSMWSFNP

SEQ ID NO: 2910 - protein, 9 aa, Severe acute respiratory syndrome coronavirus 2
RSMWSFNPE

SEQ ID NO: 2911 - protein, 10 aa, Severe acute respiratory syndrome coronavirus 2
RSMWSFNPET

SEQ ID NO: 2912 - protein, 9 aa, Severe acute respiratory syndrome coronavirus 2
SMWSFNPET

SEQ ID NO: 2913 - protein, 9 aa, Severe acute respiratory syndrome coronavirus 2
MWSFNPETN

SEQ ID NO: 2914 - protein, 10 aa, Severe acute respiratory syndrome coronavirus 2
MWSFNPETNI

SEQ ID NO: 2915 - protein, 10 aa, Severe acute respiratory syndrome coronavirus 2
SFNPETNILL

SEQ ID NO: 2916 - protein, 10 aa, Severe acute respiratory syndrome coronavirus 2
NPETNILLNV

SEQ ID NO: 2917 - protein, 10 aa, Severe acute respiratory syndrome coronavirus 2
ILLNVPLHGT

SEQ ID NO: 2918 - protein, 9 aa, Severe acute respiratory syndrome coronavirus 2
NVPLHGTIL

SEQ ID NO: 2919 - protein, 9 aa, Severe acute respiratory syndrome coronavirus 2
VPLHGTILT

SEQ ID NO: 2920 - protein, 9 aa, Severe acute respiratory syndrome coronavirus 2
RPLLESELV

SEQ ID NO: 2921 - protein, 10 aa, Severe acute respiratory syndrome coronavirus 2
RPLLESELVI

SEQ ID NO: 2922 - protein, 10 aa, Severe acute respiratory syndrome coronavirus 2
LLESELVIGA

SEQ ID NO: 2923 - protein, 9 aa, Severe acute respiratory syndrome coronavirus 2
LESELVIGA

SEQ ID NO: 2924 - protein, 9 aa, Severe acute respiratory syndrome coronavirus 2
ESELVIGAV

SEQ ID NO: 2925 - protein, 9 aa, Severe acute respiratory syndrome coronavirus 2
SELVIGAVI

SEQ ID NO: 2926 - protein, 10 aa, Severe acute respiratory syndrome coronavirus 2
SELVIGAVIL

SEQ ID NO: 2927 - protein, 9 aa, Severe acute respiratory syndrome coronavirus 2
LVIGAVILR

SEQ ID NO: 2928 - protein, 9 aa, Severe acute respiratory syndrome coronavirus 2
AVILRGHLR

SEQ ID NO: 2929 - protein, 9 aa, Severe acute respiratory syndrome coronavirus 2
ILRGHLRIA

SEQ ID NO: 2930 - protein, 9 aa, Severe acute respiratory syndrome coronavirus 2
HLRIAGHHL

SEQ ID NO: 2931 - protein, 9 aa, Severe acute respiratory syndrome coronavirus 2
RIAGHHLGR

SEQ ID NO: 2932 - protein, 10 aa, Severe acute respiratory syndrome coronavirus 2
AGHHLGRCDI

SEQ ID NO: 2933 - protein, 9 aa, Severe acute respiratory syndrome coronavirus 2
RCDIKDLPK

SEQ ID NO: 2934 - protein, 9 aa, Severe acute respiratory syndrome coronavirus 2
LPKEITVAT

SEQ ID NO: 2935 - protein, 10 aa, Severe acute respiratory syndrome coronavirus 2
LPKEITVATS

SEQ ID NO: 2936 - protein, 9 aa, Severe acute respiratory syndrome coronavirus 2
KEITVATSR

SEQ ID NO: 2937 - protein, 10 aa, Severe acute respiratory syndrome coronavirus 2
KEITVATSRT

SEQ ID NO: 2938 - protein, 9 aa, Severe acute respiratory syndrome coronavirus 2
ITVATSRTL

SEQ ID NO: 2939 - protein, 10 aa, Severe acute respiratory syndrome coronavirus 2
TVATSRTLSY

SEQ ID NO: 2940 - protein, 10 aa, Severe acute respiratory syndrome coronavirus 2
VATSRTLSYY

SEQ ID NO: 2941 - protein, 10 aa, Severe acute respiratory syndrome coronavirus 2
ATSRTLSYYK

SEQ ID NO: 2942 - protein, 9 aa, Severe acute respiratory syndrome coronavirus 2
TSRTLSYYK

SEQ ID NO: 2943 - protein, 10 aa, Severe acute respiratory syndrome coronavirus 2
RTLSYYKLGA

SEQ ID NO: 2944 - protein, 9 aa, Severe acute respiratory syndrome coronavirus 2
TLSYYKLGA

SEQ ID NO: 2945 - protein, 10 aa, Severe acute respiratory syndrome coronavirus 2
LSYYKLGASQ

SEQ ID NO: 2946 - protein, 9 aa, Severe acute respiratory syndrome coronavirus 2
SYYKLGASQ

SEQ ID NO: 2947 - protein, 10 aa, Severe acute respiratory syndrome coronavirus 2
SYYKLGASQR

SEQ ID NO: 2948 - protein, 10 aa, Severe acute respiratory syndrome coronavirus 2
SQRVAGDSGF

SEQ ID NO: 2949 - protein, 10 aa, Severe acute respiratory syndrome coronavirus 2
VAGDSGFAAY

SEQ ID NO: 2950 - protein, 9 aa, Severe acute respiratory syndrome coronavirus 2
AGDSGFAAY

SEQ ID NO: 2951 - protein, 10 aa, Severe acute respiratory syndrome coronavirus 2
DSGFAAYSRY

SEQ ID NO: 2952 - protein, 10 aa, Severe acute respiratory syndrome coronavirus 2
GFAAYSRYRI

SEQ ID NO: 2953 - protein, 9 aa, Severe acute respiratory syndrome coronavirus 2
FAAYSRYRI

SEQ ID NO: 2954 - protein, 9 aa, Severe acute respiratory syndrome coronavirus 2
YSRYRIGNY

SEQ ID NO: 2955 - protein, 10 aa, Severe acute respiratory syndrome coronavirus 2
YSRYRIGNYK

SEQ ID NO: 2956 - protein, 9 aa, Severe acute respiratory syndrome coronavirus 2
SRYRIGNYK

SEQ ID NO: 2957 - protein, 10 aa, Severe acute respiratory syndrome coronavirus 2
SRYRIGNYKL

SEQ ID NO: 2958 - protein, 9 aa, Severe acute respiratory syndrome coronavirus 2
RYRIGNYKL

SEQ ID NO: 2959 - protein, 9 aa, Severe acute respiratory syndrome coronavirus 2
NYKLNTDHS

SEQ ID NO: 2960 - protein, 10 aa, Severe acute respiratory syndrome coronavirus 2
NYKLNTDHSS

SEQ ID NO: 2961 - protein, 10 aa, Severe acute respiratory syndrome coronavirus 2
KLNTDHSSSS

SEQ ID NO: 2962 - protein, 10 aa, Severe acute respiratory syndrome coronavirus 2
NTDHSSSSDN

SEQ ID NO: 2963 - protein, 9 aa, Severe acute respiratory syndrome coronavirus 2
HSSSSDNIA

SEQ ID NO: 2964 - protein, 10 aa, Severe acute respiratory syndrome coronavirus 2
SSSSDNIALL

SEQ ID NO: 2965 - protein, 9 aa, Severe acute respiratory syndrome coronavirus 2
SSSDNIALL

SEQ ID NO: 2966 - protein, 10 aa, Severe acute respiratory syndrome coronavirus 2
SSDNIALLVQ

SEQ ID NO: 2967 - protein, 9 aa, Severe acute respiratory syndrome coronavirus 2
MSDNGPQNQ

SEQ ID NO: 2968 - protein, 10 aa, Severe acute respiratory syndrome coronavirus 2
MSDNGPQNQR

SEQ ID NO: 2969 - protein, 9 aa, Severe acute respiratory syndrome coronavirus 2
GPQNQRNAP

SEQ ID NO: 2970 - protein, 10 aa, Severe acute respiratory syndrome coronavirus 2
GPQNQRNAPR

SEQ ID NO: 2971 - protein, 10 aa, Severe acute respiratory syndrome coronavirus 2
NQRNAPRITF

SEQ ID NO: 2972 - protein, 9 aa, Severe acute respiratory syndrome coronavirus 2
QRNAPRITF

SEQ ID NO: 2973 - protein, 10 aa, Severe acute respiratory syndrome coronavirus 2
APRITFGGPS

SEQ ID NO: 2974 - protein, 10 aa, Severe acute respiratory syndrome coronavirus 2
GPSDSTGSNQ

SEQ ID NO: 2975 - protein, 9 aa, Severe acute respiratory syndrome coronavirus 2
PSDSTGSNQ

SEQ ID NO: 2976 - protein, 10 aa, Severe acute respiratory syndrome coronavirus 2
PSDSTGSNQN

SEQ ID NO: 2977 - protein, 9 aa, Severe acute respiratory syndrome coronavirus 2
RSGARSKQR

SEQ ID NO: 2978 - protein, 9 aa, Severe acute respiratory syndrome coronavirus 2
SKQRRPQGL

SEQ ID NO: 2979 - protein, 9 aa, Severe acute respiratory syndrome coronavirus 2
RPQGLPNNT

SEQ ID NO: 2980 - protein, 10 aa, Severe acute respiratory syndrome coronavirus 2
RPQGLPNNTA

SEQ ID NO: 2981 - protein, 10 aa, Severe acute respiratory syndrome coronavirus 2
QGLPNNTASW

SEQ ID NO: 2982 - protein, 9 aa, Severe acute respiratory syndrome coronavirus 2
GLPNNTASW

SEQ ID NO: 2983 - protein, 9 aa, Severe acute respiratory syndrome coronavirus 2
LPNNTASWF

SEQ ID NO: 2984 - protein, 10 aa, Severe acute respiratory syndrome coronavirus 2
NNTASWFTAL

SEQ ID NO: 2985 - protein, 9 aa, Severe acute respiratory syndrome coronavirus 2
NTASWFTAL

SEQ ID NO: 2986 - protein, 10 aa, Severe acute respiratory syndrome coronavirus 2
NTASWFTALT

SEQ ID NO: 2987 - protein, 10 aa, Severe acute respiratory syndrome coronavirus 2
SWFTALTQHG

SEQ ID NO: 2988 - protein, 9 aa, Severe acute respiratory syndrome coronavirus 2
FTALTQHGK

SEQ ID NO: 2989 - protein, 10 aa, Severe acute respiratory syndrome coronavirus 2
FTALTQHGKE

SEQ ID NO: 2990 - protein, 10 aa, Severe acute respiratory syndrome coronavirus 2
LTQHGKEDLK

SEQ ID NO: 2991 - protein, 9 aa, Severe acute respiratory syndrome coronavirus 2
FPRGQGVPI

SEQ ID NO: 2992 - protein, 10 aa, Severe acute respiratory syndrome coronavirus 2
FPRGQGVPIN

SEQ ID NO: 2993 - protein, 9 aa, Severe acute respiratory syndrome coronavirus 2
VPINTNSSP

SEQ ID NO: 2994 - protein, 10 aa, Severe acute respiratory syndrome coronavirus 2
VPINTNSSPD

SEQ ID NO: 2995 - protein, 9 aa, Severe acute respiratory syndrome coronavirus 2
NSSPDDQIG

SEQ ID NO: 2996 - protein, 10 aa, Severe acute respiratory syndrome coronavirus 2
NSSPDDQIGY

SEQ ID NO: 2997 - protein, 9 aa, Severe acute respiratory syndrome coronavirus 2
SSPDDQIGY

SEQ ID NO: 2998 - protein, 10 aa, Severe acute respiratory syndrome coronavirus 2
SSPDDQIGYY

SEQ ID NO: 2999 - protein, 9 aa, Severe acute respiratory syndrome coronavirus 2
SPDDQIGYY

SEQ ID NO: 3000 - protein, 9 aa, Severe acute respiratory syndrome coronavirus 2
GYYRRATRR

SEQ ID NO: 3001 - protein, 10 aa, Severe acute respiratory syndrome coronavirus 2
GYYRRATRRI

SEQ ID NO: 3002 - protein, 9 aa, Severe acute respiratory syndrome coronavirus 2
YYRRATRRI

SEQ ID NO: 3003 - protein, 10 aa, Severe acute respiratory syndrome coronavirus 2
RRIRGGDGKM

SEQ ID NO: 3004 - protein, 9 aa, Severe acute respiratory syndrome coronavirus 2
RIRGGDGKM

SEQ ID NO: 3005 - protein, 10 aa, Severe acute respiratory syndrome coronavirus 2
RIRGGDGKMK

SEQ ID NO: 3006 - protein, 10 aa, Severe acute respiratory syndrome coronavirus 2
GKMKDLSPRW

SEQ ID NO: 3007 - protein, 9 aa, Severe acute respiratory syndrome coronavirus 2
KMKDLSPRW

SEQ ID NO: 3008 - protein, 10 aa, Severe acute respiratory syndrome coronavirus 2
KMKDLSPRWY

SEQ ID NO: 3009 - protein, 9 aa, Severe acute respiratory syndrome coronavirus 2
MKDLSPRWY

SEQ ID NO: 3010 - protein, 10 aa, Severe acute respiratory syndrome coronavirus 2
MKDLSPRWYF

SEQ ID NO: 3011 - protein, 9 aa, Severe acute respiratory syndrome coronavirus 2
KDLSPRWYF

SEQ ID NO: 3012 - protein, 10 aa, Severe acute respiratory syndrome coronavirus 2
KDLSPRWYFY

SEQ ID NO: 3013 - protein, 9 aa, Severe acute respiratory syndrome coronavirus 2
DLSPRWYFY

SEQ ID NO: 3014 - protein, 10 aa, Severe acute respiratory syndrome coronavirus 2
DLSPRWYFYY

SEQ ID NO: 3015 - protein, 9 aa, Severe acute respiratory syndrome coronavirus 2
LSPRWYFYY

SEQ ID NO: 3016 - protein, 10 aa, Severe acute respiratory syndrome coronavirus 2
LSPRWYFYYL

SEQ ID NO: 3017 - protein, 9 aa, Severe acute respiratory syndrome coronavirus 2
SPRWYFYYL

SEQ ID NO: 3018 - protein, 10 aa, Severe acute respiratory syndrome coronavirus 2
SPRWYFYYLG

SEQ ID NO: 3019 - protein, 10 aa, Severe acute respiratory syndrome coronavirus 2
RWYFYYLGTG

SEQ ID NO: 3020 - protein, 9 aa, Severe acute respiratory syndrome coronavirus 2
WYFYYLGTG

SEQ ID NO: 3021 - protein, 10 aa, Severe acute respiratory syndrome coronavirus 2
WYFYYLGTGP

SEQ ID NO: 3022 - protein, 10 aa, Severe acute respiratory syndrome coronavirus 2
FYYLGTGPEA

SEQ ID NO: 3023 - protein, 10 aa, Severe acute respiratory syndrome coronavirus 2
YLGTGPEAGL

SEQ ID NO: 3024 - protein, 10 aa, Severe acute respiratory syndrome coronavirus 2
GTGPEAGLPY

SEQ ID NO: 3025 - protein, 9 aa, Severe acute respiratory syndrome coronavirus 2
AGLPYGANK

SEQ ID NO: 3026 - protein, 10 aa, Severe acute respiratory syndrome coronavirus 2
LPYGANKDGI

SEQ ID NO: 3027 - protein, 9 aa, Severe acute respiratory syndrome coronavirus 2
PYGANKDGI

SEQ ID NO: 3028 - protein, 9 aa, Severe acute respiratory syndrome coronavirus 2
GANKDGIIW

SEQ ID NO: 3029 - protein, 9 aa, Severe acute respiratory syndrome coronavirus 2
ANKDGIIWV

SEQ ID NO: 3030 - protein, 10 aa, Severe acute respiratory syndrome coronavirus 2
ATEGALNTPK

SEQ ID NO: 3031 - protein, 9 aa, Severe acute respiratory syndrome coronavirus 2
TEGALNTPK

SEQ ID NO: 3032 - protein, 9 aa, Severe acute respiratory syndrome coronavirus 2
TPKDHIGTR

SEQ ID NO: 3033 - protein, 10 aa, Severe acute respiratory syndrome coronavirus 2
TRNPANNAAI

SEQ ID NO: 3034 - protein, 10 aa, Severe acute respiratory syndrome coronavirus 2
RNPANNAAIV

SEQ ID NO: 3035 - protein, 9 aa, Severe acute respiratory syndrome coronavirus 2
NPANNAAIV

SEQ ID NO: 3036 - protein, 10 aa, Severe acute respiratory syndrome coronavirus 2
NPANNAAIVL

SEQ ID NO: 3037 - protein, 10 aa, Severe acute respiratory syndrome coronavirus 2
VLQLPQGTTL

SEQ ID NO: 3038 - protein, 9 aa, Severe acute respiratory syndrome coronavirus 2
LQLPQGTTL

SEQ ID NO: 3039 - protein, 10 aa, Severe acute respiratory syndrome coronavirus 2
QLPQGTTLPK

SEQ ID NO: 3040 - protein, 9 aa, Severe acute respiratory syndrome coronavirus 2
LPQGTTLPK

SEQ ID NO: 3041 - protein, 10 aa, Severe acute respiratory syndrome coronavirus 2
LPQGTTLPKG

SEQ ID NO: 3042 - protein, 10 aa, Severe acute respiratory syndrome coronavirus 2
QGTTLPKGFY

SEQ ID NO: 3043 - protein, 9 aa, Severe acute respiratory syndrome coronavirus 2
GTTLPKGFY

SEQ ID NO: 3044 - protein, 9 aa, Severe acute respiratory syndrome coronavirus 2
TTLPKGFYA

SEQ ID NO: 3045 - protein, 10 aa, Severe acute respiratory syndrome coronavirus 2
YAEGSRGGSQ

SEQ ID NO: 3046 - protein, 9 aa, Severe acute respiratory syndrome coronavirus 2
AEGSRGGSQ

SEQ ID NO: 3047 - protein, 10 aa, Severe acute respiratory syndrome coronavirus 2
AEGSRGGSQA

SEQ ID NO: 3048 - protein, 10 aa, Severe acute respiratory syndrome coronavirus 2
SSSRSRNSSR

SEQ ID NO: 3049 - protein, 10 aa, Severe acute respiratory syndrome coronavirus 2
RNSSRNSTPG

SEQ ID NO: 3050 - protein, 10 aa, Severe acute respiratory syndrome coronavirus 2
TPGSSRGTSP

SEQ ID NO: 3051 - protein, 10 aa, Severe acute respiratory syndrome coronavirus 2
GSSRGTSPAR

SEQ ID NO: 3052 - protein, 9 aa, Severe acute respiratory syndrome coronavirus 2
SPARMAGNG

SEQ ID NO: 3053 - protein, 10 aa, Severe acute respiratory syndrome coronavirus 2
SPARMAGNGG

SEQ ID NO: 3054 - protein, 9 aa, Severe acute respiratory syndrome coronavirus 2
RMAGNGGDA

SEQ ID NO: 3055 - protein, 9 aa, Severe acute respiratory syndrome coronavirus 2
MAGNGGDAA

SEQ ID NO: 3056 - protein, 10 aa, Severe acute respiratory syndrome coronavirus 2
MAGNGGDAAL

SEQ ID NO: 3057 - protein, 10 aa, Severe acute respiratory syndrome coronavirus 2
GDAALALLLL

SEQ ID NO: 3058 - protein, 10 aa, Severe acute respiratory syndrome coronavirus 2
ALALLLLDRL

SEQ ID NO: 3059 - protein, 10 aa, Severe acute respiratory syndrome coronavirus 2
LLLLDRLNQL

SEQ ID NO: 3060 - protein, 9 aa, Severe acute respiratory syndrome coronavirus 2
LLLDRLNQL

SEQ ID NO: 3061 - protein, 10 aa, Severe acute respiratory syndrome coronavirus 2
LLDRLNQLES

SEQ ID NO: 3062 - protein, 10 aa, Severe acute respiratory syndrome coronavirus 2
NQLESKMSGK

SEQ ID NO: 3063 - protein, 9 aa, Severe acute respiratory syndrome coronavirus 2
QLESKMSGK

SEQ ID NO: 3064 - protein, 10 aa, Severe acute respiratory syndrome coronavirus 2
QLESKMSGKG

SEQ ID NO: 3065 - protein, 10 aa, Severe acute respiratory syndrome coronavirus 2
QQQGQTVTKK

SEQ ID NO: 3066 - protein, 9 aa, Severe acute respiratory syndrome coronavirus 2
QQGQTVTKK

SEQ ID NO: 3067 - protein, 9 aa, Severe acute respiratory syndrome coronavirus 2
KSAAEASKK

SEQ ID NO: 3068 - protein, 9 aa, Severe acute respiratory syndrome coronavirus 2
AEASKKPRQ

SEQ ID NO: 3069 - protein, 10 aa, Severe acute respiratory syndrome coronavirus 2
AEASKKPRQK

SEQ ID NO: 3070 - protein, 9 aa, Severe acute respiratory syndrome coronavirus 2
ASKKPRQKR

SEQ ID NO: 3071 - protein, 10 aa, Severe acute respiratory syndrome coronavirus 2
KPRQKRTATK

SEQ ID NO: 3072 - protein, 9 aa, Severe acute respiratory syndrome coronavirus 2
RTATKAYNV

SEQ ID NO: 3073 - protein, 9 aa, Severe acute respiratory syndrome coronavirus 2
KAYNVTQAF

SEQ ID NO: 3074 - protein, 10 aa, Severe acute respiratory syndrome coronavirus 2
AYNVTQAFGR

SEQ ID NO: 3075 - protein, 9 aa, Severe acute respiratory syndrome coronavirus 2
GPEQTQGNF

SEQ ID NO: 3076 - protein, 10 aa, Severe acute respiratory syndrome coronavirus 2
QTQGNFGDQE

SEQ ID NO: 3077 - protein, 10 aa, Severe acute respiratory syndrome coronavirus 2
QELIRQGTDY

SEQ ID NO: 3078 - protein, 9 aa, Severe acute respiratory syndrome coronavirus 2
ELIRQGTDY

SEQ ID NO: 3079 - protein, 10 aa, Severe acute respiratory syndrome coronavirus 2
ELIRQGTDYK

SEQ ID NO: 3080 - protein, 9 aa, Severe acute respiratory syndrome coronavirus 2
LIRQGTDYK

SEQ ID NO: 3081 - protein, 9 aa, Severe acute respiratory syndrome coronavirus 2
RQGTDYKHW

SEQ ID NO: 3082 - protein, 9 aa, Severe acute respiratory syndrome coronavirus 2
GTDYKHWPQ

SEQ ID NO: 3083 - protein, 10 aa, Severe acute respiratory syndrome coronavirus 2
GTDYKHWPQI

SEQ ID NO: 3084 - protein, 9 aa, Severe acute respiratory syndrome coronavirus 2
TDYKHWPQI

SEQ ID NO: 3085 - protein, 9 aa, Severe acute respiratory syndrome coronavirus 2
DYKHWPQIA

SEQ ID NO: 3086 - protein, 9 aa, Severe acute respiratory syndrome coronavirus 2
HWPQIAQFA

SEQ ID NO: 3087 - protein, 9 aa, Severe acute respiratory syndrome coronavirus 2
WPQIAQFAP

SEQ ID NO: 3088 - protein, 10 aa, Severe acute respiratory syndrome coronavirus 2
WPQIAQFAPS

SEQ ID NO: 3089 - protein, 10 aa, Severe acute respiratory syndrome coronavirus 2
AQFAPSASAF

SEQ ID NO: 3090 - protein, 10 aa, Severe acute respiratory syndrome coronavirus 2
QFAPSASAFF

SEQ ID NO: 3091 - protein, 9 aa, Severe acute respiratory syndrome coronavirus 2
FAPSASAFF

SEQ ID NO: 3092 - protein, 10 aa, Severe acute respiratory syndrome coronavirus 2
APSASAFFGM

SEQ ID NO: 3093 - protein, 9 aa, Severe acute respiratory syndrome coronavirus 2
PSASAFFGM

SEQ ID NO: 3094 - protein, 10 aa, Severe acute respiratory syndrome coronavirus 2
SASAFFGMSR

SEQ ID NO: 3095 - protein, 9 aa, Severe acute respiratory syndrome coronavirus 2
ASAFFGMSR

SEQ ID NO: 3096 - protein, 10 aa, Severe acute respiratory syndrome coronavirus 2
ASAFFGMSRI

SEQ ID NO: 3097 - protein, 10 aa, Severe acute respiratory syndrome coronavirus 2
FGMSRIGMEV

SEQ ID NO: 3098 - protein, 9 aa, Severe acute respiratory syndrome coronavirus 2
GMSRIGMEV

SEQ ID NO: 3099 - protein, 10 aa, Severe acute respiratory syndrome coronavirus 2
GMEVTPSGTW

SEQ ID NO: 3100 - protein, 9 aa, Severe acute respiratory syndrome coronavirus 2
MEVTPSGTW

SEQ ID NO: 3101 - protein, 10 aa, Severe acute respiratory syndrome coronavirus 2
MEVTPSGTWL

SEQ ID NO: 3102 - protein, 9 aa, Severe acute respiratory syndrome coronavirus 2
VTPSGTWLT

SEQ ID NO: 3103 - protein, 10 aa, Severe acute respiratory syndrome coronavirus 2
VTPSGTWLTY

SEQ ID NO: 3104 - protein, 9 aa, Severe acute respiratory syndrome coronavirus 2
TPSGTWLTY

SEQ ID NO: 3105 - protein, 10 aa, Severe acute respiratory syndrome coronavirus 2
TPSGTWLTYT

SEQ ID NO: 3106 - protein, 9 aa, Severe acute respiratory syndrome coronavirus 2
GTWLTYTGA

SEQ ID NO: 3107 - protein, 9 aa, Severe acute respiratory syndrome coronavirus 2
TWLTYTGAI

SEQ ID NO: 3108 - protein, 10 aa, Severe acute respiratory syndrome coronavirus 2
TWLTYTGAIK

SEQ ID NO: 3109 - protein, 9 aa, Severe acute respiratory syndrome coronavirus 2
WLTYTGAIK

SEQ ID NO: 3110 - protein, 10 aa, Severe acute respiratory syndrome coronavirus 2
WLTYTGAIKL

SEQ ID NO: 3111 - protein, 9 aa, Severe acute respiratory syndrome coronavirus 2
LTYTGAIKL

SEQ ID NO: 3112 - protein, 9 aa, Severe acute respiratory syndrome coronavirus 2
TYTGAIKLD

SEQ ID NO: 3113 - protein, 10 aa, Severe acute respiratory syndrome coronavirus 2
YTGAIKLDDK

SEQ ID NO: 3114 - protein, 9 aa, Severe acute respiratory syndrome coronavirus 2
KLDDKDPNF

SEQ ID NO: 3115 - protein, 10 aa, Severe acute respiratory syndrome coronavirus 2
KLDDKDPNFK

SEQ ID NO: 3116 - protein, 10 aa, Severe acute respiratory syndrome coronavirus 2
DKDPNFKDQV

SEQ ID NO: 3117 - protein, 9 aa, Severe acute respiratory syndrome coronavirus 2
DPNFKDQVI

SEQ ID NO: 3118 - protein, 10 aa, Severe acute respiratory syndrome coronavirus 2
DPNFKDQVIL

SEQ ID NO: 3119 - protein, 9 aa, Severe acute respiratory syndrome coronavirus 2
NFKDQVILL

SEQ ID NO: 3120 - protein, 10 aa, Severe acute respiratory syndrome coronavirus 2
FKDQVILLNK

SEQ ID NO: 3121 - protein, 9 aa, Severe acute respiratory syndrome coronavirus 2
QVILLNKHI

SEQ ID NO: 3122 - protein, 10 aa, Severe acute respiratory syndrome coronavirus 2
ILLNKHIDAY

SEQ ID NO: 3123 - protein, 9 aa, Severe acute respiratory syndrome coronavirus 2
LLNKHIDAY

SEQ ID NO: 3124 - protein, 10 aa, Severe acute respiratory syndrome coronavirus 2
LLNKHIDAYK

SEQ ID NO: 3125 - protein, 9 aa, Severe acute respiratory syndrome coronavirus 2
KHIDAYKTF

SEQ ID NO: 3126 - protein, 9 aa, Severe acute respiratory syndrome coronavirus 2
KTFPPTEPK

SEQ ID NO: 3127 - protein, 10 aa, Severe acute respiratory syndrome coronavirus 2
KTFPPTEPKK

SEQ ID NO: 3128 - protein, 10 aa, Severe acute respiratory syndrome coronavirus 2
PTEPKKDKKK

SEQ ID NO: 3129 - protein, 9 aa, Severe acute respiratory syndrome coronavirus 2
KKADETQAL

SEQ ID NO: 3130 - protein, 9 aa, Severe acute respiratory syndrome coronavirus 2
TQALPQRQK

SEQ ID NO: 3131 - protein, 10 aa, Severe acute respiratory syndrome coronavirus 2
TQALPQRQKK

SEQ ID NO: 3132 - protein, 10 aa, Severe acute respiratory syndrome coronavirus 2
RQKKQQTVTL

SEQ ID NO: 3133 - protein, 9 aa, Severe acute respiratory syndrome coronavirus 2
KKQQTVTLL

SEQ ID NO: 3134 - protein, 10 aa, Severe acute respiratory syndrome coronavirus 2
KQQTVTLLPA

SEQ ID NO: 3135 - protein, 9 aa, Severe acute respiratory syndrome coronavirus 2
LPAADLDDF

SEQ ID NO: 3136 - protein, 9 aa, Severe acute respiratory syndrome coronavirus 2
AADLDDFSK

SEQ ID NO: 3137 - protein, 10 aa, Severe acute respiratory syndrome coronavirus 2
AADLDDFSKQ

SEQ ID NO: 3138 - protein, 10 aa, Severe acute respiratory syndrome coronavirus 2
DLDDFSKQLQ

SEQ ID NO: 3139 - protein, 10 aa, Severe acute respiratory syndrome coronavirus 2
LDDFSKQLQQ

SEQ ID NO: 3140 - protein, 9 aa, Severe acute respiratory syndrome coronavirus 2
MSSADSTQA

SEQ ID NO: 3141 - protein, 9 aa, Severe acute respiratory syndrome coronavirus 2
MGYINVFAF

SEQ ID NO: 3142 - protein, 9 aa, Severe acute respiratory syndrome coronavirus 2
GYINVFAFP

SEQ ID NO: 3143 - protein, 10 aa, Severe acute respiratory syndrome coronavirus 2
GYINVFAFPF

SEQ ID NO: 3144 - protein, 9 aa, Severe acute respiratory syndrome coronavirus 2
YINVFAFPF

SEQ ID NO: 3145 - protein, 10 aa, Severe acute respiratory syndrome coronavirus 2
YINVFAFPFT

SEQ ID NO: 3146 - protein, 10 aa, Severe acute respiratory syndrome coronavirus 2
INVFAFPFTI

SEQ ID NO: 3147 - protein, 9 aa, Severe acute respiratory syndrome coronavirus 2
NVFAFPFTI

SEQ ID NO: 3148 - protein, 10 aa, Severe acute respiratory syndrome coronavirus 2
NVFAFPFTIY

SEQ ID NO: 3149 - protein, 10 aa, Severe acute respiratory syndrome coronavirus 2
VFAFPFTIYS

SEQ ID NO: 3150 - protein, 10 aa, Severe acute respiratory syndrome coronavirus 2
FAFPFTIYSL

SEQ ID NO: 3151 - protein, 9 aa, Severe acute respiratory syndrome coronavirus 2
AFPFTIYSL

SEQ ID NO: 3152 - protein, 10 aa, Severe acute respiratory syndrome coronavirus 2
AFPFTIYSLL

SEQ ID NO: 3153 - protein, 9 aa, Severe acute respiratory syndrome coronavirus 2
FPFTIYSLL

SEQ ID NO: 3154 - protein, 10 aa, Severe acute respiratory syndrome coronavirus 2
FPFTIYSLLL

SEQ ID NO: 3155 - protein, 9 aa, Severe acute respiratory syndrome coronavirus 2
PFTIYSLLL

SEQ ID NO: 3156 - protein, 10 aa, Severe acute respiratory syndrome coronavirus 2
FTIYSLLLCR

SEQ ID NO: 3157 - protein, 9 aa, Severe acute respiratory syndrome coronavirus 2
TIYSLLLCR

SEQ ID NO: 3158 - protein, 10 aa, Severe acute respiratory syndrome coronavirus 2
TIYSLLLCRM

SEQ ID NO: 3159 - protein, 10 aa, Severe acute respiratory syndrome coronavirus 2
SLLLCRMNSR

SEQ ID NO: 3160 - protein, 9 aa, Severe acute respiratory syndrome coronavirus 2
LLLCRMNSR

SEQ ID NO: 3161 - protein, 10 aa, Severe acute respiratory syndrome coronavirus 2
LLLCRMNSRN

SEQ ID NO: 3162 - protein, 10 aa, Severe acute respiratory syndrome coronavirus 2
LLCRMNSRNY

SEQ ID NO: 3163 - protein, 9 aa, Severe acute respiratory syndrome coronavirus 2
LCRMNSRNY

SEQ ID NO: 3164 - protein, 9 aa, Severe acute respiratory syndrome coronavirus 2
CRMNSRNYI

SEQ ID NO: 3165 - protein, 10 aa, Severe acute respiratory syndrome coronavirus 2
CRMNSRNYIA

SEQ ID NO: 3166 - protein, 9 aa, Severe acute respiratory syndrome coronavirus 2
RMNSRNYIA

SEQ ID NO: 3167 - protein, 10 aa, Severe acute respiratory syndrome coronavirus 2
AQVDVVNFNL

SEQ ID NO: 3168 - protein, 9 aa, Severe acute respiratory syndrome coronavirus 2
QVDVVNFNL

SEQ ID NO: 3169 - protein, 10 aa, Severe acute respiratory syndrome coronavirus 2
QVDVVNFNLT

SEQ ID NO: 3170 - protein, 10 aa, Severe acute respiratory syndrome coronavirus 2
FRKMAFPSGK

SEQ ID NO: 3171 - protein, 9 aa, Severe acute respiratory syndrome coronavirus 2
RKMAFPSGK

SEQ ID NO: 3172 - protein, 9 aa, Severe acute respiratory syndrome coronavirus 2
KMAFPSGKV

SEQ ID NO: 3173 - protein, 10 aa, Severe acute respiratory syndrome coronavirus 2
FPSGKVEGCM

SEQ ID NO: 3174 - protein, 9 aa, Severe acute respiratory syndrome coronavirus 2
KVEGCMVQV

SEQ ID NO: 3175 - protein, 9 aa, Severe acute respiratory syndrome coronavirus 2
VEGCMVQVT

SEQ ID NO: 3176 - protein, 9 aa, Severe acute respiratory syndrome coronavirus 2
CMVQVTCGT

SEQ ID NO: 3177 - protein, 10 aa, Severe acute respiratory syndrome coronavirus 2
VQVTCGTTTL

SEQ ID NO: 3178 - protein, 9 aa, Severe acute respiratory syndrome coronavirus 2
QVTCGTTTL

SEQ ID NO: 3179 - protein, 10 aa, Severe acute respiratory syndrome coronavirus 2
CGTTTLNGLW

SEQ ID NO: 3180 - protein, 9 aa, Severe acute respiratory syndrome coronavirus 2
TTTLNGLWL

SEQ ID NO: 3181 - protein, 10 aa, Severe acute respiratory syndrome coronavirus 2
TTTLNGLWLD

SEQ ID NO: 3182 - protein, 10 aa, Severe acute respiratory syndrome coronavirus 2
TLNGLWLDDV

SEQ ID NO: 3183 - protein, 9 aa, Severe acute respiratory syndrome coronavirus 2
GLWLDDVVY

SEQ ID NO: 3184 - protein, 10 aa, Severe acute respiratory syndrome coronavirus 2
LWLDDVVYCP

SEQ ID NO: 3185 - protein, 9 aa, Severe acute respiratory syndrome coronavirus 2
WLDDVVYCP

SEQ ID NO: 3186 - protein, 10 aa, Severe acute respiratory syndrome coronavirus 2
WLDDVVYCPR

SEQ ID NO: 3187 - protein, 9 aa, Severe acute respiratory syndrome coronavirus 2
VVYCPRHVI

SEQ ID NO: 3188 - protein, 10 aa, Severe acute respiratory syndrome coronavirus 2
VYCPRHVICT

SEQ ID NO: 3189 - protein, 9 aa, Severe acute respiratory syndrome coronavirus 2
CPRHVICTS

SEQ ID NO: 3190 - protein, 10 aa, Severe acute respiratory syndrome coronavirus 2
CPRHVICTSE

SEQ ID NO: 3191 - protein, 9 aa, Severe acute respiratory syndrome coronavirus 2
CTSEDMLNP

SEQ ID NO: 3192 - protein, 9 aa, Severe acute respiratory syndrome coronavirus 2
TSEDMLNPN

SEQ ID NO: 3193 - protein, 10 aa, Severe acute respiratory syndrome coronavirus 2
TSEDMLNPNY

SEQ ID NO: 3194 - protein, 9 aa, Severe acute respiratory syndrome coronavirus 2
SEDMLNPNY

SEQ ID NO: 3195 - protein, 9 aa, Severe acute respiratory syndrome coronavirus 2
MLNPNYEDL

SEQ ID NO: 3196 - protein, 9 aa, Severe acute respiratory syndrome coronavirus 2
LIRKSNHNF

SEQ ID NO: 3197 - protein, 10 aa, Severe acute respiratory syndrome coronavirus 2
LIRKSNHNFL

SEQ ID NO: 3198 - protein, 9 aa, Severe acute respiratory syndrome coronavirus 2
IRKSNHNFL

SEQ ID NO: 3199 - protein, 9 aa, Severe acute respiratory syndrome coronavirus 2
RKSNHNFLV

SEQ ID NO: 3200 - protein, 9 aa, Severe acute respiratory syndrome coronavirus 2
KSNHNFLVQ

SEQ ID NO: 3201 - protein, 9 aa, Severe acute respiratory syndrome coronavirus 2
LVQAGNVQL

SEQ ID NO: 3202 - protein, 9 aa, Severe acute respiratory syndrome coronavirus 2
VQAGNVQLR

SEQ ID NO: 3203 - protein, 10 aa, Severe acute respiratory syndrome coronavirus 2
VQAGNVQLRV

SEQ ID NO: 3204 - protein, 9 aa, Severe acute respiratory syndrome coronavirus 2
RVIGHSMQN

SEQ ID NO: 3205 - protein, 10 aa, Severe acute respiratory syndrome coronavirus 2
IGHSMQNCVL

SEQ ID NO: 3206 - protein, 9 aa, Severe acute respiratory syndrome coronavirus 2
HSMQNCVLK

SEQ ID NO: 3207 - protein, 9 aa, Severe acute respiratory syndrome coronavirus 2
SMQNCVLKL

SEQ ID NO: 3208 - protein, 10 aa, Severe acute respiratory syndrome coronavirus 2
SMQNCVLKLK

SEQ ID NO: 3209 - protein, 9 aa, Severe acute respiratory syndrome coronavirus 2
MQNCVLKLK

SEQ ID NO: 3210 - protein, 10 aa, Severe acute respiratory syndrome coronavirus 2
MQNCVLKLKV

SEQ ID NO: 3211 - protein, 10 aa, Severe acute respiratory syndrome coronavirus 2
KLKVDTANPK

SEQ ID NO: 3212 - protein, 9 aa, Severe acute respiratory syndrome coronavirus 2
DTANPKTPK

SEQ ID NO: 3213 - protein, 10 aa, Severe acute respiratory syndrome coronavirus 2
DTANPKTPKY

SEQ ID NO: 3214 - protein, 9 aa, Severe acute respiratory syndrome coronavirus 2
TANPKTPKY

SEQ ID NO: 3215 - protein, 10 aa, Severe acute respiratory syndrome coronavirus 2
TANPKTPKYK

SEQ ID NO: 3216 - protein, 10 aa, Severe acute respiratory syndrome coronavirus 2
ANPKTPKYKF

SEQ ID NO: 3217 - protein, 9 aa, Severe acute respiratory syndrome coronavirus 2
NPKTPKYKF

SEQ ID NO: 3218 - protein, 9 aa, Severe acute respiratory syndrome coronavirus 2
KTPKYKFVR

SEQ ID NO: 3219 - protein, 9 aa, Severe acute respiratory syndrome coronavirus 2
TPKYKFVRI

SEQ ID NO: 3220 - protein, 10 aa, Severe acute respiratory syndrome coronavirus 2
TPKYKFVRIQ

SEQ ID NO: 3221 - protein, 9 aa, Severe acute respiratory syndrome coronavirus 2
VRIQPGQTF

SEQ ID NO: 3222 - protein, 10 aa, Severe acute respiratory syndrome coronavirus 2
RIQPGQTFSV

SEQ ID NO: 3223 - protein, 10 aa, Severe acute respiratory syndrome coronavirus 2
IQPGQTFSVL

SEQ ID NO: 3224 - protein, 9 aa, Severe acute respiratory syndrome coronavirus 2
QPGQTFSVL

SEQ ID NO: 3225 - protein, 10 aa, Severe acute respiratory syndrome coronavirus 2
GQTFSVLACY

SEQ ID NO: 3226 - protein, 9 aa, Severe acute respiratory syndrome coronavirus 2
QTFSVLACY

SEQ ID NO: 3227 - protein, 10 aa, Severe acute respiratory syndrome coronavirus 2
ACYNGSPSGV

SEQ ID NO: 3228 - protein, 9 aa, Severe acute respiratory syndrome coronavirus 2
CYNGSPSGV

SEQ ID NO: 3229 - protein, 10 aa, Severe acute respiratory syndrome coronavirus 2
CYNGSPSGVY

SEQ ID NO: 3230 - protein, 9 aa, Severe acute respiratory syndrome coronavirus 2
YNGSPSGVY

SEQ ID NO: 3231 - protein, 9 aa, Severe acute respiratory syndrome coronavirus 2
SPSGVYQCA

SEQ ID NO: 3232 - protein, 10 aa, Severe acute respiratory syndrome coronavirus 2
SPSGVYQCAM

SEQ ID NO: 3233 - protein, 9 aa, Severe acute respiratory syndrome coronavirus 2
GVYQCAMRP

SEQ ID NO: 3234 - protein, 9 aa, Severe acute respiratory syndrome coronavirus 2
VYQCAMRPN

SEQ ID NO: 3235 - protein, 10 aa, Severe acute respiratory syndrome coronavirus 2
VYQCAMRPNF

SEQ ID NO: 3236 - protein, 10 aa, Severe acute respiratory syndrome coronavirus 2
YQCAMRPNFT

SEQ ID NO: 3237 - protein, 9 aa, Severe acute respiratory syndrome coronavirus 2
CAMRPNFTI

SEQ ID NO: 3238 - protein, 10 aa, Severe acute respiratory syndrome coronavirus 2
CAMRPNFTIK

SEQ ID NO: 3239 - protein, 9 aa, Severe acute respiratory syndrome coronavirus 2
AMRPNFTIK

SEQ ID NO: 3240 - protein, 10 aa, Severe acute respiratory syndrome coronavirus 2
RPNFTIKGSF

SEQ ID NO: 3241 - protein, 9 aa, Severe acute respiratory syndrome coronavirus 2
NFTIKGSFL

SEQ ID NO: 3242 - protein, 9 aa, Severe acute respiratory syndrome coronavirus 2
FTIKGSFLN

SEQ ID NO: 3243 - protein, 10 aa, Severe acute respiratory syndrome coronavirus 2
FTIKGSFLNG

SEQ ID NO: 3244 - protein, 10 aa, Severe acute respiratory syndrome coronavirus 2
SFLNGSCGSV

SEQ ID NO: 3245 - protein, 9 aa, Severe acute respiratory syndrome coronavirus 2
FLNGSCGSV

SEQ ID NO: 3246 - protein, 10 aa, Severe acute respiratory syndrome coronavirus 2
GSCGSVGFNI

SEQ ID NO: 3247 - protein, 9 aa, Severe acute respiratory syndrome coronavirus 2
GSVGFNIDY

SEQ ID NO: 3248 - protein, 9 aa, Severe acute respiratory syndrome coronavirus 2
NIDYDCVSF

SEQ ID NO: 3249 - protein, 10 aa, Severe acute respiratory syndrome coronavirus 2
IDYDCVSFCY

SEQ ID NO: 3250 - protein, 9 aa, Severe acute respiratory syndrome coronavirus 2
DYDCVSFCY

SEQ ID NO: 3251 - protein, 9 aa, Severe acute respiratory syndrome coronavirus 2
CVSFCYMHH

SEQ ID NO: 3252 - protein, 10 aa, Severe acute respiratory syndrome coronavirus 2
CVSFCYMHHM

SEQ ID NO: 3253 - protein, 9 aa, Severe acute respiratory syndrome coronavirus 2
VSFCYMHHM

SEQ ID NO: 3254 - protein, 10 aa, Severe acute respiratory syndrome coronavirus 2
SFCYMHHMEL

SEQ ID NO: 3255 - protein, 9 aa, Severe acute respiratory syndrome coronavirus 2
CYMHHMELP

SEQ ID NO: 3256 - protein, 10 aa, Severe acute respiratory syndrome coronavirus 2
CYMHHMELPT

SEQ ID NO: 3257 - protein, 9 aa, Severe acute respiratory syndrome coronavirus 2
YMHHMELPT

SEQ ID NO: 3258 - protein, 9 aa, Severe acute respiratory syndrome coronavirus 2
HMELPTGVH

SEQ ID NO: 3259 - protein, 10 aa, Severe acute respiratory syndrome coronavirus 2
HMELPTGVHA

SEQ ID NO: 3260 - protein, 9 aa, Severe acute respiratory syndrome coronavirus 2
MELPTGVHA

SEQ ID NO: 3261 - protein, 10 aa, Severe acute respiratory syndrome coronavirus 2
MELPTGVHAG

SEQ ID NO: 3262 - protein, 10 aa, Severe acute respiratory syndrome coronavirus 2
LPTGVHAGTD

SEQ ID NO: 3263 - protein, 10 aa, Severe acute respiratory syndrome coronavirus 2
AGTDLEGNFY

SEQ ID NO: 3264 - protein, 9 aa, Severe acute respiratory syndrome coronavirus 2
GTDLEGNFY

SEQ ID NO: 3265 - protein, 10 aa, Severe acute respiratory syndrome coronavirus 2
GTDLEGNFYG

SEQ ID NO: 3266 - protein, 10 aa, Severe acute respiratory syndrome coronavirus 2
DLEGNFYGPF

SEQ ID NO: 3267 - protein, 9 aa, Severe acute respiratory syndrome coronavirus 2
LEGNFYGPF

SEQ ID NO: 3268 - protein, 10 aa, Severe acute respiratory syndrome coronavirus 2
LEGNFYGPFV

SEQ ID NO: 3269 - protein, 9 aa, Severe acute respiratory syndrome coronavirus 2
FYGPFVDRQ

SEQ ID NO: 3270 - protein, 9 aa, Severe acute respiratory syndrome coronavirus 2
GPFVDRQTA

SEQ ID NO: 3271 - protein, 10 aa, Severe acute respiratory syndrome coronavirus 2
GPFVDRQTAQ

SEQ ID NO: 3272 - protein, 9 aa, Severe acute respiratory syndrome coronavirus 2
FVDRQTAQA

SEQ ID NO: 3273 - protein, 10 aa, Severe acute respiratory syndrome coronavirus 2
FVDRQTAQAA

SEQ ID NO: 3274 - protein, 10 aa, Severe acute respiratory syndrome coronavirus 2
AQAAGTDTTI

SEQ ID NO: 3275 - protein, 10 aa, Severe acute respiratory syndrome coronavirus 2
GTDTTITVNV

SEQ ID NO: 3276 - protein, 9 aa, Severe acute respiratory syndrome coronavirus 2
TTITVNVLA

SEQ ID NO: 3277 - protein, 9 aa, Severe acute respiratory syndrome coronavirus 2
TITVNVLAW

SEQ ID NO: 3278 - protein, 10 aa, Severe acute respiratory syndrome coronavirus 2
TITVNVLAWL

SEQ ID NO: 3279 - protein, 9 aa, Severe acute respiratory syndrome coronavirus 2
ITVNVLAWL

SEQ ID NO: 3280 - protein, 10 aa, Severe acute respiratory syndrome coronavirus 2
ITVNVLAWLY

SEQ ID NO: 3281 - protein, 9 aa, Severe acute respiratory syndrome coronavirus 2
TVNVLAWLY

SEQ ID NO: 3282 - protein, 10 aa, Severe acute respiratory syndrome coronavirus 2
TVNVLAWLYA

SEQ ID NO: 3283 - protein, 9 aa, Severe acute respiratory syndrome coronavirus 2
NVLAWLYAA

SEQ ID NO: 3284 - protein, 10 aa, Severe acute respiratory syndrome coronavirus 2
NVLAWLYAAV

SEQ ID NO: 3285 - protein, 9 aa, Severe acute respiratory syndrome coronavirus 2
VLAWLYAAV

SEQ ID NO: 3286 - protein, 10 aa, Severe acute respiratory syndrome coronavirus 2
VLAWLYAAVI

SEQ ID NO: 3287 - protein, 9 aa, Severe acute respiratory syndrome coronavirus 2
LAWLYAAVI

SEQ ID NO: 3288 - protein, 9 aa, Severe acute respiratory syndrome coronavirus 2
WLYAAVING

SEQ ID NO: 3289 - protein, 10 aa, Severe acute respiratory syndrome coronavirus 2
WLYAAVINGD

SEQ ID NO: 3290 - protein, 9 aa, Severe acute respiratory syndrome coronavirus 2
LYAAVINGD

SEQ ID NO: 3291 - protein, 9 aa, Severe acute respiratory syndrome coronavirus 2
AAVINGDRW

SEQ ID NO: 3292 - protein, 10 aa, Severe acute respiratory syndrome coronavirus 2
AAVINGDRWF

SEQ ID NO: 3293 - protein, 10 aa, Severe acute respiratory syndrome coronavirus 2
AVINGDRWFL

SEQ ID NO: 3294 - protein, 9 aa, Severe acute respiratory syndrome coronavirus 2
VINGDRWFL

SEQ ID NO: 3295 - protein, 10 aa, Severe acute respiratory syndrome coronavirus 2
NGDRWFLNRF

SEQ ID NO: 3296 - protein, 9 aa, Severe acute respiratory syndrome coronavirus 2
RWFLNRFTT

SEQ ID NO: 3297 - protein, 10 aa, Severe acute respiratory syndrome coronavirus 2
RWFLNRFTTT

SEQ ID NO: 3298 - protein, 9 aa, Severe acute respiratory syndrome coronavirus 2
WFLNRFTTT

SEQ ID NO: 3299 - protein, 10 aa, Severe acute respiratory syndrome coronavirus 2
WFLNRFTTTL

SEQ ID NO: 3300 - protein, 9 aa, Severe acute respiratory syndrome coronavirus 2
FLNRFTTTL

SEQ ID NO: 3301 - protein, 10 aa, Severe acute respiratory syndrome coronavirus 2
FLNRFTTTLN

SEQ ID NO: 3302 - protein, 10 aa, Severe acute respiratory syndrome coronavirus 2
NRFTTTLNDF

SEQ ID NO: 3303 - protein, 9 aa, Severe acute respiratory syndrome coronavirus 2
RFTTTLNDF

SEQ ID NO: 3304 - protein, 9 aa, Severe acute respiratory syndrome coronavirus 2
FTTTLNDFN

SEQ ID NO: 3305 - protein, 10 aa, Severe acute respiratory syndrome coronavirus 2
FTTTLNDFNL

SEQ ID NO: 3306 - protein, 9 aa, Severe acute respiratory syndrome coronavirus 2
TTTLNDFNL

SEQ ID NO: 3307 - protein, 10 aa, Severe acute respiratory syndrome coronavirus 2
TTTLNDFNLV

SEQ ID NO: 3308 - protein, 9 aa, Severe acute respiratory syndrome coronavirus 2
TTLNDFNLV

SEQ ID NO: 3309 - protein, 10 aa, Severe acute respiratory syndrome coronavirus 2
TTLNDFNLVA

SEQ ID NO: 3310 - protein, 9 aa, Severe acute respiratory syndrome coronavirus 2
TLNDFNLVA

SEQ ID NO: 3311 - protein, 10 aa, Severe acute respiratory syndrome coronavirus 2
TLNDFNLVAM

SEQ ID NO: 3312 - protein, 10 aa, Severe acute respiratory syndrome coronavirus 2
FNLVAMKYNY

SEQ ID NO: 3313 - protein, 10 aa, Severe acute respiratory syndrome coronavirus 2
VAMKYNYEPL

SEQ ID NO: 3314 - protein, 9 aa, Severe acute respiratory syndrome coronavirus 2
AMKYNYEPL

SEQ ID NO: 3315 - protein, 9 aa, Severe acute respiratory syndrome coronavirus 2
KYNYEPLTQ

SEQ ID NO: 3316 - protein, 10 aa, Severe acute respiratory syndrome coronavirus 2
NYEPLTQDHV

SEQ ID NO: 3317 - protein, 9 aa, Severe acute respiratory syndrome coronavirus 2
LTQDHVDIL

SEQ ID NO: 3318 - protein, 10 aa, Severe acute respiratory syndrome coronavirus 2
LTQDHVDILG

SEQ ID NO: 3319 - protein, 9 aa, Severe acute respiratory syndrome coronavirus 2
HVDILGPLS

SEQ ID NO: 3320 - protein, 10 aa, Severe acute respiratory syndrome coronavirus 2
HVDILGPLSA

SEQ ID NO: 3321 - protein, 9 aa, Severe acute respiratory syndrome coronavirus 2
GPLSAQTGI

SEQ ID NO: 3322 - protein, 10 aa, Severe acute respiratory syndrome coronavirus 2
GPLSAQTGIA

SEQ ID NO: 3323 - protein, 9 aa, Severe acute respiratory syndrome coronavirus 2
LSAQTGIAV

SEQ ID NO: 3324 - protein, 10 aa, Severe acute respiratory syndrome coronavirus 2
LSAQTGIAVL

SEQ ID NO: 3325 - protein, 9 aa, Severe acute respiratory syndrome coronavirus 2
SAQTGIAVL

SEQ ID NO: 3326 - protein, 10 aa, Severe acute respiratory syndrome coronavirus 2
AQTGIAVLDM

SEQ ID NO: 3327 - protein, 9 aa, Severe acute respiratory syndrome coronavirus 2
AVLDMCASL

SEQ ID NO: 3328 - protein, 10 aa, Severe acute respiratory syndrome coronavirus 2
AVLDMCASLK

SEQ ID NO: 3329 - protein, 9 aa, Severe acute respiratory syndrome coronavirus 2
VLDMCASLK

SEQ ID NO: 3330 - protein, 10 aa, Severe acute respiratory syndrome coronavirus 2
VLDMCASLKE

SEQ ID NO: 3331 - protein, 10 aa, Severe acute respiratory syndrome coronavirus 2
DMCASLKELL

SEQ ID NO: 3332 - protein, 10 aa, Severe acute respiratory syndrome coronavirus 2
KELLQNGMNG

SEQ ID NO: 3333 - protein, 10 aa, Severe acute respiratory syndrome coronavirus 2
LQNGMNGRTI

SEQ ID NO: 3334 - protein, 9 aa, Severe acute respiratory syndrome coronavirus 2
NGMNGRTIL

SEQ ID NO: 3335 - protein, 10 aa, Severe acute respiratory syndrome coronavirus 2
GMNGRTILGS

SEQ ID NO: 3336 - protein, 9 aa, Severe acute respiratory syndrome coronavirus 2
RTILGSALL

SEQ ID NO: 3337 - protein, 9 aa, Severe acute respiratory syndrome coronavirus 2
LLEDEFTPF

SEQ ID NO: 3338 - protein, 10 aa, Severe acute respiratory syndrome coronavirus 2
LLEDEFTPFD

SEQ ID NO: 3339 - protein, 9 aa, Severe acute respiratory syndrome coronavirus 2
TPFDVVRQC

SEQ ID NO: 3340 - protein, 9 aa, Severe acute respiratory syndrome coronavirus 2
VVRQCSGVT

SEQ ID NO: 3341 - protein, 10 aa, Severe acute respiratory syndrome coronavirus 2
VVRQCSGVTF

SEQ ID NO: 3342 - protein, 9 aa, Severe acute respiratory syndrome coronavirus 2
VRQCSGVTF

SEQ ID NO: 3343 - protein, 9 aa, Severe acute respiratory syndrome coronavirus 2
AENVTGLFK

SEQ ID NO: 3344 - protein, 10 aa, Severe acute respiratory syndrome coronavirus 2
VTGLFKDCSK

SEQ ID NO: 3345 - protein, 9 aa, Severe acute respiratory syndrome coronavirus 2
GLFKDCSKV

SEQ ID NO: 3346 - protein, 9 aa, Severe acute respiratory syndrome coronavirus 2
LFKDCSKVI

SEQ ID NO: 3347 - protein, 9 aa, Severe acute respiratory syndrome coronavirus 2
KVITGLHPT

SEQ ID NO: 3348 - protein, 9 aa, Severe acute respiratory syndrome coronavirus 2
GLHPTQAPT

SEQ ID NO: 3349 - protein, 9 aa, Severe acute respiratory syndrome coronavirus 2
HPTQAPTHL

SEQ ID NO: 3350 - protein, 9 aa, Severe acute respiratory syndrome coronavirus 2
APTHLSVDT

SEQ ID NO: 3351 - protein, 9 aa, Severe acute respiratory syndrome coronavirus 2
HLSVDTKFK

SEQ ID NO: 3352 - protein, 10 aa, Severe acute respiratory syndrome coronavirus 2
SVDTKFKTEG

SEQ ID NO: 3353 - protein, 10 aa, Severe acute respiratory syndrome coronavirus 2
VDTKFKTEGL

SEQ ID NO: 3354 - protein, 9 aa, Severe acute respiratory syndrome coronavirus 2
TEGLCVDIP

SEQ ID NO: 3355 - protein, 9 aa, Severe acute respiratory syndrome coronavirus 2
GLCVDIPGI

SEQ ID NO: 3356 - protein, 9 aa, Severe acute respiratory syndrome coronavirus 2
CVDIPGIPK

SEQ ID NO: 3357 - protein, 9 aa, Severe acute respiratory syndrome coronavirus 2
IPGIPKDMT

SEQ ID NO: 3358 - protein, 9 aa, Severe acute respiratory syndrome coronavirus 2
PGIPKDMTY

SEQ ID NO: 3359 - protein, 10 aa, Severe acute respiratory syndrome coronavirus 2
IPKDMTYRRL

SEQ ID NO: 3360 - protein, 9 aa, Severe acute respiratory syndrome coronavirus 2
KDMTYRRLI

SEQ ID NO: 3361 - protein, 9 aa, Severe acute respiratory syndrome coronavirus 2
MTYRRLISM

SEQ ID NO: 3362 - protein, 10 aa, Severe acute respiratory syndrome coronavirus 2
MTYRRLISMM

SEQ ID NO: 3363 - protein, 9 aa, Severe acute respiratory syndrome coronavirus 2
TYRRLISMM

SEQ ID NO: 3364 - protein, 9 aa, Severe acute respiratory syndrome coronavirus 2
RRLISMMGF

SEQ ID NO: 3365 - protein, 10 aa, Severe acute respiratory syndrome coronavirus 2
RRLISMMGFK

SEQ ID NO: 3366 - protein, 9 aa, Severe acute respiratory syndrome coronavirus 2
RLISMMGFK

SEQ ID NO: 3367 - protein, 10 aa, Severe acute respiratory syndrome coronavirus 2
RLISMMGFKM

SEQ ID NO: 3368 - protein, 10 aa, Severe acute respiratory syndrome coronavirus 2
ISMMGFKMNY

SEQ ID NO: 3369 - protein, 9 aa, Severe acute respiratory syndrome coronavirus 2
SMMGFKMNY

SEQ ID NO: 3370 - protein, 10 aa, Severe acute respiratory syndrome coronavirus 2
SMMGFKMNYQ

SEQ ID NO: 3371 - protein, 9 aa, Severe acute respiratory syndrome coronavirus 2
MMGFKMNYQ

SEQ ID NO: 3372 - protein, 10 aa, Severe acute respiratory syndrome coronavirus 2
MMGFKMNYQV

SEQ ID NO: 3373 - protein, 9 aa, Severe acute respiratory syndrome coronavirus 2
MGFKMNYQV

SEQ ID NO: 3374 - protein, 10 aa, Severe acute respiratory syndrome coronavirus 2
FKMNYQVNGY

SEQ ID NO: 3375 - protein, 9 aa, Severe acute respiratory syndrome coronavirus 2
KMNYQVNGY

SEQ ID NO: 3376 - protein, 10 aa, Severe acute respiratory syndrome coronavirus 2
KMNYQVNGYP

SEQ ID NO: 3377 - protein, 9 aa, Severe acute respiratory syndrome coronavirus 2
NYQVNGYPN

SEQ ID NO: 3378 - protein, 9 aa, Severe acute respiratory syndrome coronavirus 2
YQVNGYPNM

SEQ ID NO: 3379 - protein, 10 aa, Severe acute respiratory syndrome coronavirus 2
YQVNGYPNMF

SEQ ID NO: 3380 - protein, 10 aa, Severe acute respiratory syndrome coronavirus 2
QVNGYPNMFI

SEQ ID NO: 3381 - protein, 9 aa, Severe acute respiratory syndrome coronavirus 2
GYPNMFITR

SEQ ID NO: 3382 - protein, 10 aa, Severe acute respiratory syndrome coronavirus 2
GYPNMFITRE

SEQ ID NO: 3383 - protein, 10 aa, Severe acute respiratory syndrome coronavirus 2
NMFITREEAI

SEQ ID NO: 3384 - protein, 9 aa, Severe acute respiratory syndrome coronavirus 2
MFITREEAI

SEQ ID NO: 3385 - protein, 10 aa, Severe acute respiratory syndrome coronavirus 2
REEAIRHVRA

SEQ ID NO: 3386 - protein, 9 aa, Severe acute respiratory syndrome coronavirus 2
EEAIRHVRA

SEQ ID NO: 3387 - protein, 10 aa, Severe acute respiratory syndrome coronavirus 2
EEAIRHVRAW

SEQ ID NO: 3388 - protein, 9 aa, Severe acute respiratory syndrome coronavirus 2
EAIRHVRAW

SEQ ID NO: 3389 - protein, 9 aa, Severe acute respiratory syndrome coronavirus 2
AIRHVRAWI

SEQ ID NO: 3390 - protein, 10 aa, Severe acute respiratory syndrome coronavirus 2
HVRAWIGFDV

SEQ ID NO: 3391 - protein, 9 aa, Severe acute respiratory syndrome coronavirus 2
VEGCHATRE

SEQ ID NO: 3392 - protein, 10 aa, Severe acute respiratory syndrome coronavirus 2
VEGCHATREA

SEQ ID NO: 3393 - protein, 10 aa, Severe acute respiratory syndrome coronavirus 2
ATREAVGTNL

SEQ ID NO: 3394 - protein, 10 aa, Severe acute respiratory syndrome coronavirus 2
REAVGTNLPL

SEQ ID NO: 3395 - protein, 9 aa, Severe acute respiratory syndrome coronavirus 2
TNLPLQLGF

SEQ ID NO: 3396 - protein, 10 aa, Severe acute respiratory syndrome coronavirus 2
NLPLQLGFST

SEQ ID NO: 3397 - protein, 9 aa, Severe acute respiratory syndrome coronavirus 2
LPLQLGFST

SEQ ID NO: 3398 - protein, 10 aa, Severe acute respiratory syndrome coronavirus 2
LPLQLGFSTG

SEQ ID NO: 3399 - protein, 10 aa, Severe acute respiratory syndrome coronavirus 2
PLQLGFSTGV

SEQ ID NO: 3400 - protein, 9 aa, Severe acute respiratory syndrome coronavirus 2
LQLGFSTGV

SEQ ID NO: 3401 - protein, 10 aa, Severe acute respiratory syndrome coronavirus 2
GFSTGVNLVA

SEQ ID NO: 3402 - protein, 9 aa, Severe acute respiratory syndrome coronavirus 2
FSTGVNLVA

SEQ ID NO: 3403 - protein, 10 aa, Severe acute respiratory syndrome coronavirus 2
FSTGVNLVAV

SEQ ID NO: 3404 - protein, 10 aa, Severe acute respiratory syndrome coronavirus 2
NLVAVPTGYV

SEQ ID NO: 3405 - protein, 9 aa, Severe acute respiratory syndrome coronavirus 2
LVAVPTGYV

SEQ ID NO: 3406 - protein, 10 aa, Severe acute respiratory syndrome coronavirus 2
GYVDTPNNTD

SEQ ID NO: 3407 - protein, 9 aa, Severe acute respiratory syndrome coronavirus 2
YVDTPNNTD

SEQ ID NO: 3408 - protein, 10 aa, Severe acute respiratory syndrome coronavirus 2
YVDTPNNTDF

SEQ ID NO: 3409 - protein, 10 aa, Severe acute respiratory syndrome coronavirus 2
TPNNTDFSRV

SEQ ID NO: 3410 - protein, 9 aa, Severe acute respiratory syndrome coronavirus 2
NTDFSRVSA

SEQ ID NO: 3411 - protein, 10 aa, Severe acute respiratory syndrome coronavirus 2
NTDFSRVSAK

SEQ ID NO: 3412 - protein, 9 aa, Severe acute respiratory syndrome coronavirus 2
TDFSRVSAK

SEQ ID NO: 3413 - protein, 9 aa, Severe acute respiratory syndrome coronavirus 2
QFKHLIPLM

SEQ ID NO: 3414 - protein, 10 aa, Severe acute respiratory syndrome coronavirus 2
QFKHLIPLMY

SEQ ID NO: 3415 - protein, 9 aa, Severe acute respiratory syndrome coronavirus 2
FKHLIPLMY

SEQ ID NO: 3416 - protein, 10 aa, Severe acute respiratory syndrome coronavirus 2
FKHLIPLMYK

SEQ ID NO: 3417 - protein, 9 aa, Severe acute respiratory syndrome coronavirus 2
KHLIPLMYK

SEQ ID NO: 3418 - protein, 10 aa, Severe acute respiratory syndrome coronavirus 2
HLIPLMYKGL

SEQ ID NO: 3419 - protein, 9 aa, Severe acute respiratory syndrome coronavirus 2
PLMYKGLPW

SEQ ID NO: 3420 - protein, 9 aa, Severe acute respiratory syndrome coronavirus 2
LMYKGLPWN

SEQ ID NO: 3421 - protein, 10 aa, Severe acute respiratory syndrome coronavirus 2
LMYKGLPWNV

SEQ ID NO: 3422 - protein, 9 aa, Severe acute respiratory syndrome coronavirus 2
MYKGLPWNV

SEQ ID NO: 3423 - protein, 10 aa, Severe acute respiratory syndrome coronavirus 2
MYKGLPWNVV

SEQ ID NO: 3424 - protein, 9 aa, Severe acute respiratory syndrome coronavirus 2
GLPWNVVRI

SEQ ID NO: 3425 - protein, 10 aa, Severe acute respiratory syndrome coronavirus 2
GLPWNVVRIK

SEQ ID NO: 3426 - protein, 9 aa, Severe acute respiratory syndrome coronavirus 2
LPWNVVRIK

SEQ ID NO: 3427 - protein, 10 aa, Severe acute respiratory syndrome coronavirus 2
LPWNVVRIKI

SEQ ID NO: 3428 - protein, 9 aa, Severe acute respiratory syndrome coronavirus 2
PWNVVRIKI

SEQ ID NO: 3429 - protein, 9 aa, Severe acute respiratory syndrome coronavirus 2
VVRIKIVQM

SEQ ID NO: 3430 - protein, 9 aa, Severe acute respiratory syndrome coronavirus 2
VRIKIVQML

SEQ ID NO: 3431 - protein, 9 aa, Severe acute respiratory syndrome coronavirus 2
IVQMLSDTL

SEQ ID NO: 3432 - protein, 10 aa, Severe acute respiratory syndrome coronavirus 2
IVQMLSDTLK

SEQ ID NO: 3433 - protein, 10 aa, Severe acute respiratory syndrome coronavirus 2
QMLSDTLKNL

SEQ ID NO: 3434 - protein, 9 aa, Severe acute respiratory syndrome coronavirus 2
MLSDTLKNL

SEQ ID NO: 3435 - protein, 10 aa, Severe acute respiratory syndrome coronavirus 2
MLSDTLKNLS

SEQ ID NO: 3436 - protein, 9 aa, Severe acute respiratory syndrome coronavirus 2
LSDTLKNLS

SEQ ID NO: 3437 - protein, 10 aa, Severe acute respiratory syndrome coronavirus 2
LSDTLKNLSD

SEQ ID NO: 3438 - protein, 9 aa, Severe acute respiratory syndrome coronavirus 2
TLKNLSDRV

SEQ ID NO: 3439 - protein, 10 aa, Severe acute respiratory syndrome coronavirus 2
TLKNLSDRVV

SEQ ID NO: 3440 - protein, 10 aa, Severe acute respiratory syndrome coronavirus 2
LKNLSDRVVF

SEQ ID NO: 3441 - protein, 9 aa, Severe acute respiratory syndrome coronavirus 2
NLSDRVVFV

SEQ ID NO: 3442 - protein, 10 aa, Severe acute respiratory syndrome coronavirus 2
NLSDRVVFVL

SEQ ID NO: 3443 - protein, 9 aa, Severe acute respiratory syndrome coronavirus 2
LSDRVVFVL

SEQ ID NO: 3444 - protein, 10 aa, Severe acute respiratory syndrome coronavirus 2
LSDRVVFVLW

SEQ ID NO: 3445 - protein, 9 aa, Severe acute respiratory syndrome coronavirus 2
SDRVVFVLW

SEQ ID NO: 3446 - protein, 9 aa, Severe acute respiratory syndrome coronavirus 2
RVVFVLWAH

SEQ ID NO: 3447 - protein, 10 aa, Severe acute respiratory syndrome coronavirus 2
RVVFVLWAHG

SEQ ID NO: 3448 - protein, 10 aa, Severe acute respiratory syndrome coronavirus 2
VVFVLWAHGF

SEQ ID NO: 3449 - protein, 9 aa, Severe acute respiratory syndrome coronavirus 2
VFVLWAHGF

SEQ ID NO: 3450 - protein, 10 aa, Severe acute respiratory syndrome coronavirus 2
VFVLWAHGFE

SEQ ID NO: 3451 - protein, 10 aa, Severe acute respiratory syndrome coronavirus 2
FVLWAHGFEL

SEQ ID NO: 3452 - protein, 9 aa, Severe acute respiratory syndrome coronavirus 2
VLWAHGFEL

SEQ ID NO: 3453 - protein, 10 aa, Severe acute respiratory syndrome coronavirus 2
VLWAHGFELT

SEQ ID NO: 3454 - protein, 10 aa, Severe acute respiratory syndrome coronavirus 2
LWAHGFELTS

SEQ ID NO: 3455 - protein, 9 aa, Severe acute respiratory syndrome coronavirus 2
HGFELTSMK

SEQ ID NO: 3456 - protein, 10 aa, Severe acute respiratory syndrome coronavirus 2
HGFELTSMKY

SEQ ID NO: 3457 - protein, 9 aa, Severe acute respiratory syndrome coronavirus 2
GFELTSMKY

SEQ ID NO: 3458 - protein, 9 aa, Severe acute respiratory syndrome coronavirus 2
FELTSMKYF

SEQ ID NO: 3459 - protein, 10 aa, Severe acute respiratory syndrome coronavirus 2
FELTSMKYFV

SEQ ID NO: 3460 - protein, 9 aa, Severe acute respiratory syndrome coronavirus 2
ELTSMKYFV

SEQ ID NO: 3461 - protein, 10 aa, Severe acute respiratory syndrome coronavirus 2
ELTSMKYFVK

SEQ ID NO: 3462 - protein, 9 aa, Severe acute respiratory syndrome coronavirus 2
LTSMKYFVK

SEQ ID NO: 3463 - protein, 10 aa, Severe acute respiratory syndrome coronavirus 2
LTSMKYFVKI

SEQ ID NO: 3464 - protein, 9 aa, Severe acute respiratory syndrome coronavirus 2
TSMKYFVKI

SEQ ID NO: 3465 - protein, 10 aa, Severe acute respiratory syndrome coronavirus 2
SMKYFVKIGP

SEQ ID NO: 3466 - protein, 10 aa, Severe acute respiratory syndrome coronavirus 2
KYFVKIGPER

SEQ ID NO: 3467 - protein, 10 aa, Severe acute respiratory syndrome coronavirus 2
KIGPERTCCL

SEQ ID NO: 3468 - protein, 9 aa, Severe acute respiratory syndrome coronavirus 2
IGPERTCCL

SEQ ID NO: 3469 - protein, 9 aa, Severe acute respiratory syndrome coronavirus 2
RTCCLCDRR

SEQ ID NO: 3470 - protein, 10 aa, Severe acute respiratory syndrome coronavirus 2
CLCDRRATCF

SEQ ID NO: 3471 - protein, 9 aa, Severe acute respiratory syndrome coronavirus 2
LCDRRATCF

SEQ ID NO: 3472 - protein, 9 aa, Severe acute respiratory syndrome coronavirus 2
RRATCFSTA

SEQ ID NO: 3473 - protein, 9 aa, Severe acute respiratory syndrome coronavirus 2
CFSTASDTY

SEQ ID NO: 3474 - protein, 9 aa, Severe acute respiratory syndrome coronavirus 2
FSTASDTYA

SEQ ID NO: 3475 - protein, 9 aa, Severe acute respiratory syndrome coronavirus 2
TASDTYACW

SEQ ID NO: 3476 - protein, 9 aa, Severe acute respiratory syndrome coronavirus 2
ASDTYACWH

SEQ ID NO: 3477 - protein, 10 aa, Severe acute respiratory syndrome coronavirus 2
ASDTYACWHH

SEQ ID NO: 3478 - protein, 10 aa, Severe acute respiratory syndrome coronavirus 2
SDTYACWHHS

SEQ ID NO: 3479 - protein, 9 aa, Severe acute respiratory syndrome coronavirus 2
TYACWHHSI

SEQ ID NO: 3480 - protein, 10 aa, Severe acute respiratory syndrome coronavirus 2
TYACWHHSIG

SEQ ID NO: 3481 - protein, 9 aa, Severe acute respiratory syndrome coronavirus 2
ACWHHSIGF

SEQ ID NO: 3482 - protein, 10 aa, Severe acute respiratory syndrome coronavirus 2
CWHHSIGFDY

SEQ ID NO: 3483 - protein, 9 aa, Severe acute respiratory syndrome coronavirus 2
WHHSIGFDY

SEQ ID NO: 3484 - protein, 9 aa, Severe acute respiratory syndrome coronavirus 2
HSIGFDYVY

SEQ ID NO: 3485 - protein, 10 aa, Severe acute respiratory syndrome coronavirus 2
IGFDYVYNPF

SEQ ID NO: 3486 - protein, 9 aa, Severe acute respiratory syndrome coronavirus 2
GFDYVYNPF

SEQ ID NO: 3487 - protein, 9 aa, Severe acute respiratory syndrome coronavirus 2
FDYVYNPFM

SEQ ID NO: 3488 - protein, 10 aa, Severe acute respiratory syndrome coronavirus 2
FDYVYNPFMI

SEQ ID NO: 3489 - protein, 9 aa, Severe acute respiratory syndrome coronavirus 2
DYVYNPFMI

SEQ ID NO: 3490 - protein, 10 aa, Severe acute respiratory syndrome coronavirus 2
YVYNPFMIDV

SEQ ID NO: 3491 - protein, 9 aa, Severe acute respiratory syndrome coronavirus 2
VYNPFMIDV

SEQ ID NO: 3492 - protein, 10 aa, Severe acute respiratory syndrome coronavirus 2
VYNPFMIDVQ

SEQ ID NO: 3493 - protein, 9 aa, Severe acute respiratory syndrome coronavirus 2
PFMIDVQQW

SEQ ID NO: 3494 - protein, 9 aa, Severe acute respiratory syndrome coronavirus 2
FMIDVQQWG

SEQ ID NO: 3495 - protein, 10 aa, Severe acute respiratory syndrome coronavirus 2
FMIDVQQWGF

SEQ ID NO: 3496 - protein, 9 aa, Severe acute respiratory syndrome coronavirus 2
MIDVQQWGF

SEQ ID NO: 3497 - protein, 10 aa, Severe acute respiratory syndrome coronavirus 2
MIDVQQWGFT

SEQ ID NO: 3498 - protein, 10 aa, Severe acute respiratory syndrome coronavirus 2
VQQWGFTGNL

SEQ ID NO: 3499 - protein, 9 aa, Severe acute respiratory syndrome coronavirus 2
QQWGFTGNL

SEQ ID NO: 3500 - protein, 9 aa, Severe acute respiratory syndrome coronavirus 2
FTGNLQSNH

SEQ ID NO: 3501 - protein, 10 aa, Severe acute respiratory syndrome coronavirus 2
FTGNLQSNHD

SEQ ID NO: 3502 - protein, 9 aa, Severe acute respiratory syndrome coronavirus 2
NLQSNHDLY

SEQ ID NO: 3503 - protein, 10 aa, Severe acute respiratory syndrome coronavirus 2
NLQSNHDLYC

SEQ ID NO: 3504 - protein, 9 aa, Severe acute respiratory syndrome coronavirus 2
CQVHGNAHV

SEQ ID NO: 3505 - protein, 10 aa, Severe acute respiratory syndrome coronavirus 2
AHVASCDAIM

SEQ ID NO: 3506 - protein, 9 aa, Severe acute respiratory syndrome coronavirus 2
HVASCDAIM

SEQ ID NO: 3507 - protein, 9 aa, Severe acute respiratory syndrome coronavirus 2
ASCDAIMTR

SEQ ID NO: 3508 - protein, 10 aa, Severe acute respiratory syndrome coronavirus 2
ASCDAIMTRC

SEQ ID NO: 3509 - protein, 9 aa, Severe acute respiratory syndrome coronavirus 2
CDAIMTRCL

SEQ ID NO: 3510 - protein, 9 aa, Severe acute respiratory syndrome coronavirus 2
AIMTRCLAV

SEQ ID NO: 3511 - protein, 9 aa, Severe acute respiratory syndrome coronavirus 2
IMTRCLAVH

SEQ ID NO: 3512 - protein, 10 aa, Severe acute respiratory syndrome coronavirus 2
TRCLAVHECF

SEQ ID NO: 3513 - protein, 9 aa, Severe acute respiratory syndrome coronavirus 2
RCLAVHECF

SEQ ID NO: 3514 - protein, 9 aa, Severe acute respiratory syndrome coronavirus 2
CLAVHECFV

SEQ ID NO: 3515 - protein, 10 aa, Severe acute respiratory syndrome coronavirus 2
CLAVHECFVK

SEQ ID NO: 3516 - protein, 9 aa, Severe acute respiratory syndrome coronavirus 2
AVHECFVKR

SEQ ID NO: 3517 - protein, 10 aa, Severe acute respiratory syndrome coronavirus 2
HECFVKRVDW

SEQ ID NO: 3518 - protein, 10 aa, Severe acute respiratory syndrome coronavirus 2
CFVKRVDWTI

SEQ ID NO: 3519 - protein, 9 aa, Severe acute respiratory syndrome coronavirus 2
FVKRVDWTI

SEQ ID NO: 3520 - protein, 9 aa, Severe acute respiratory syndrome coronavirus 2
KRVDWTIEY

SEQ ID NO: 3521 - protein, 10 aa, Severe acute respiratory syndrome coronavirus 2
RVDWTIEYPI

SEQ ID NO: 3522 - protein, 9 aa, Severe acute respiratory syndrome coronavirus 2
DWTIEYPII

SEQ ID NO: 3523 - protein, 10 aa, Severe acute respiratory syndrome coronavirus 2
IEYPIIGDEL

SEQ ID NO: 3524 - protein, 9 aa, Severe acute respiratory syndrome coronavirus 2
EYPIIGDEL

SEQ ID NO: 3525 - protein, 10 aa, Severe acute respiratory syndrome coronavirus 2
EYPIIGDELK

SEQ ID NO: 3526 - protein, 10 aa, Severe acute respiratory syndrome coronavirus 2
YPIIGDELKI

SEQ ID NO: 3527 - protein, 9 aa, Severe acute respiratory syndrome coronavirus 2
DELKINAAC

SEQ ID NO: 3528 - protein, 9 aa, Severe acute respiratory syndrome coronavirus 2
KINAACRKV

SEQ ID NO: 3529 - protein, 9 aa, Severe acute respiratory syndrome coronavirus 2
ACRKVQHMV

SEQ ID NO: 3530 - protein, 10 aa, Severe acute respiratory syndrome coronavirus 2
ACRKVQHMVV

SEQ ID NO: 3531 - protein, 10 aa, Severe acute respiratory syndrome coronavirus 2
VQHMVVKAAL

SEQ ID NO: 3532 - protein, 10 aa, Severe acute respiratory syndrome coronavirus 2
QHMVVKAALL

SEQ ID NO: 3533 - protein, 10 aa, Severe acute respiratory syndrome coronavirus 2
VVKAALLADK

SEQ ID NO: 3534 - protein, 9 aa, Severe acute respiratory syndrome coronavirus 2
KAALLADKF

SEQ ID NO: 3535 - protein, 9 aa, Severe acute respiratory syndrome coronavirus 2
ALLADKFPV

SEQ ID NO: 3536 - protein, 10 aa, Severe acute respiratory syndrome coronavirus 2
ALLADKFPVL

SEQ ID NO: 3537 - protein, 9 aa, Severe acute respiratory syndrome coronavirus 2
LLADKFPVL

SEQ ID NO: 3538 - protein, 9 aa, Severe acute respiratory syndrome coronavirus 2
LADKFPVLH

SEQ ID NO: 3539 - protein, 10 aa, Severe acute respiratory syndrome coronavirus 2
LADKFPVLHD

SEQ ID NO: 3540 - protein, 10 aa, Severe acute respiratory syndrome coronavirus 2
PVLHDIGNPK

SEQ ID NO: 3541 - protein, 9 aa, Severe acute respiratory syndrome coronavirus 2
VLHDIGNPK

SEQ ID NO: 3542 - protein, 10 aa, Severe acute respiratory syndrome coronavirus 2
NPKAIKCVPQ

SEQ ID NO: 3543 - protein, 10 aa, Severe acute respiratory syndrome coronavirus 2
VPQADVEWKF

SEQ ID NO: 3544 - protein, 9 aa, Severe acute respiratory syndrome coronavirus 2
PQADVEWKF

SEQ ID NO: 3545 - protein, 9 aa, Severe acute respiratory syndrome coronavirus 2
QADVEWKFY

SEQ ID NO: 3546 - protein, 10 aa, Severe acute respiratory syndrome coronavirus 2
QADVEWKFYD

SEQ ID NO: 3547 - protein, 10 aa, Severe acute respiratory syndrome coronavirus 2
ADVEWKFYDA

SEQ ID NO: 3548 - protein, 9 aa, Severe acute respiratory syndrome coronavirus 2
VEWKFYDAQ

SEQ ID NO: 3549 - protein, 10 aa, Severe acute respiratory syndrome coronavirus 2
VEWKFYDAQP

SEQ ID NO: 3550 - protein, 10 aa, Severe acute respiratory syndrome coronavirus 2
AQPCSDKAYK

SEQ ID NO: 3551 - protein, 10 aa, Severe acute respiratory syndrome coronavirus 2
QPCSDKAYKI

SEQ ID NO: 3552 - protein, 9 aa, Severe acute respiratory syndrome coronavirus 2
CSDKAYKIE

SEQ ID NO: 3553 - protein, 10 aa, Severe acute respiratory syndrome coronavirus 2
CSDKAYKIEE

SEQ ID NO: 3554 - protein, 10 aa, Severe acute respiratory syndrome coronavirus 2
KAYKIEELFY

SEQ ID NO: 3555 - protein, 10 aa, Severe acute respiratory syndrome coronavirus 2
YKIEELFYSY

SEQ ID NO: 3556 - protein, 9 aa, Severe acute respiratory syndrome coronavirus 2
KIEELFYSY

SEQ ID NO: 3557 - protein, 9 aa, Severe acute respiratory syndrome coronavirus 2
IEELFYSYA

SEQ ID NO: 3558 - protein, 10 aa, Severe acute respiratory syndrome coronavirus 2
IEELFYSYAT

SEQ ID NO: 3559 - protein, 9 aa, Severe acute respiratory syndrome coronavirus 2
EELFYSYAT

SEQ ID NO: 3560 - protein, 10 aa, Severe acute respiratory syndrome coronavirus 2
EELFYSYATH

SEQ ID NO: 3561 - protein, 10 aa, Severe acute respiratory syndrome coronavirus 2
LFYSYATHSD

SEQ ID NO: 3562 - protein, 9 aa, Severe acute respiratory syndrome coronavirus 2
FYSYATHSD

SEQ ID NO: 3563 - protein, 10 aa, Severe acute respiratory syndrome coronavirus 2
FYSYATHSDK

SEQ ID NO: 3564 - protein, 9 aa, Severe acute respiratory syndrome coronavirus 2
YSYATHSDK

SEQ ID NO: 3565 - protein, 10 aa, Severe acute respiratory syndrome coronavirus 2
YSYATHSDKF

SEQ ID NO: 3566 - protein, 9 aa, Severe acute respiratory syndrome coronavirus 2
SYATHSDKF

SEQ ID NO: 3567 - protein, 9 aa, Severe acute respiratory syndrome coronavirus 2
HSDKFTDGV

SEQ ID NO: 3568 - protein, 10 aa, Severe acute respiratory syndrome coronavirus 2
HSDKFTDGVC

SEQ ID NO: 3569 - protein, 9 aa, Severe acute respiratory syndrome coronavirus 2
KFTDGVCLF

SEQ ID NO: 3570 - protein, 10 aa, Severe acute respiratory syndrome coronavirus 2
KFTDGVCLFW

SEQ ID NO: 3571 - protein, 9 aa, Severe acute respiratory syndrome coronavirus 2
FTDGVCLFW

SEQ ID NO: 3572 - protein, 10 aa, Severe acute respiratory syndrome coronavirus 2
FTDGVCLFWN

SEQ ID NO: 3573 - protein, 10 aa, Severe acute respiratory syndrome coronavirus 2
TDGVCLFWNC

SEQ ID NO: 3574 - protein, 10 aa, Severe acute respiratory syndrome coronavirus 2
GVCLFWNCNV

SEQ ID NO: 3575 - protein, 10 aa, Severe acute respiratory syndrome coronavirus 2
CLFWNCNVDR

SEQ ID NO: 3576 - protein, 9 aa, Severe acute respiratory syndrome coronavirus 2
FWNCNVDRY

SEQ ID NO: 3577 - protein, 10 aa, Severe acute respiratory syndrome coronavirus 2
FWNCNVDRYP

SEQ ID NO: 3578 - protein, 10 aa, Severe acute respiratory syndrome coronavirus 2
NVDRYPANSI

SEQ ID NO: 3579 - protein, 9 aa, Severe acute respiratory syndrome coronavirus 2
RYPANSIVC

SEQ ID NO: 3580 - protein, 9 aa, Severe acute respiratory syndrome coronavirus 2
YPANSIVCR

SEQ ID NO: 3581 - protein, 10 aa, Severe acute respiratory syndrome coronavirus 2
YPANSIVCRF

SEQ ID NO: 3582 - protein, 10 aa, Severe acute respiratory syndrome coronavirus 2
SIVCRFDTRV

SEQ ID NO: 3583 - protein, 9 aa, Severe acute respiratory syndrome coronavirus 2
VCRFDTRVL

SEQ ID NO: 3584 - protein, 10 aa, Severe acute respiratory syndrome coronavirus 2
RFDTRVLSNL

SEQ ID NO: 3585 - protein, 10 aa, Severe acute respiratory syndrome coronavirus 2
NLPGCDGGSL

SEQ ID NO: 3586 - protein, 9 aa, Severe acute respiratory syndrome coronavirus 2
LPGCDGGSL

SEQ ID NO: 3587 - protein, 10 aa, Severe acute respiratory syndrome coronavirus 2
LPGCDGGSLY

SEQ ID NO: 3588 - protein, 10 aa, Severe acute respiratory syndrome coronavirus 2
GSLYVNKHAF

SEQ ID NO: 3589 - protein, 9 aa, Severe acute respiratory syndrome coronavirus 2
SLYVNKHAF

SEQ ID NO: 3590 - protein, 9 aa, Severe acute respiratory syndrome coronavirus 2
LYVNKHAFH

SEQ ID NO: 3591 - protein, 10 aa, Severe acute respiratory syndrome coronavirus 2
LYVNKHAFHT

SEQ ID NO: 3592 - protein, 9 aa, Severe acute respiratory syndrome coronavirus 2
YVNKHAFHT

SEQ ID NO: 3593 - protein, 10 aa, Severe acute respiratory syndrome coronavirus 2
NKHAFHTPAF

SEQ ID NO: 3594 - protein, 9 aa, Severe acute respiratory syndrome coronavirus 2
KHAFHTPAF

SEQ ID NO: 3595 - protein, 10 aa, Severe acute respiratory syndrome coronavirus 2
HAFHTPAFDK

SEQ ID NO: 3596 - protein, 9 aa, Severe acute respiratory syndrome coronavirus 2
TPAFDKSAF

SEQ ID NO: 3597 - protein, 10 aa, Severe acute respiratory syndrome coronavirus 2
TPAFDKSAFV

SEQ ID NO: 3598 - protein, 10 aa, Severe acute respiratory syndrome coronavirus 2
AFDKSAFVNL

SEQ ID NO: 3599 - protein, 10 aa, Severe acute respiratory syndrome coronavirus 2
KSAFVNLKQL

SEQ ID NO: 3600 - protein, 10 aa, Severe acute respiratory syndrome coronavirus 2
AFVNLKQLPF

SEQ ID NO: 3601 - protein, 9 aa, Severe acute respiratory syndrome coronavirus 2
FVNLKQLPF

SEQ ID NO: 3602 - protein, 10 aa, Severe acute respiratory syndrome coronavirus 2
FVNLKQLPFF

SEQ ID NO: 3603 - protein, 9 aa, Severe acute respiratory syndrome coronavirus 2
NLKQLPFFY

SEQ ID NO: 3604 - protein, 10 aa, Severe acute respiratory syndrome coronavirus 2
NLKQLPFFYY

SEQ ID NO: 3605 - protein, 9 aa, Severe acute respiratory syndrome coronavirus 2
LKQLPFFYY

SEQ ID NO: 3606 - protein, 9 aa, Severe acute respiratory syndrome coronavirus 2
KQLPFFYYS

SEQ ID NO: 3607 - protein, 10 aa, Severe acute respiratory syndrome coronavirus 2
KQLPFFYYSD

SEQ ID NO: 3608 - protein, 9 aa, Severe acute respiratory syndrome coronavirus 2
FYYSDSPCE

SEQ ID NO: 3609 - protein, 9 aa, Severe acute respiratory syndrome coronavirus 2
YYSDSPCES

SEQ ID NO: 3610 - protein, 9 aa, Severe acute respiratory syndrome coronavirus 2
YSDSPCESH

SEQ ID NO: 3611 - protein, 10 aa, Severe acute respiratory syndrome coronavirus 2
YSDSPCESHG

SEQ ID NO: 3612 - protein, 10 aa, Severe acute respiratory syndrome coronavirus 2
SDSPCESHGK

SEQ ID NO: 3613 - protein, 10 aa, Severe acute respiratory syndrome coronavirus 2
SPCESHGKQV

SEQ ID NO: 3614 - protein, 10 aa, Severe acute respiratory syndrome coronavirus 2
KQVVSDIDYV

SEQ ID NO: 3615 - protein, 9 aa, Severe acute respiratory syndrome coronavirus 2
VSDIDYVPL

SEQ ID NO: 3616 - protein, 10 aa, Severe acute respiratory syndrome coronavirus 2
VSDIDYVPLK

SEQ ID NO: 3617 - protein, 10 aa, Severe acute respiratory syndrome coronavirus 2
DIDYVPLKSA

SEQ ID NO: 3618 - protein, 10 aa, Severe acute respiratory syndrome coronavirus 2
YVPLKSATCI

SEQ ID NO: 3619 - protein, 9 aa, Severe acute respiratory syndrome coronavirus 2
VPLKSATCI

SEQ ID NO: 3620 - protein, 10 aa, Severe acute respiratory syndrome coronavirus 2
VPLKSATCIT

SEQ ID NO: 3621 - protein, 10 aa, Severe acute respiratory syndrome coronavirus 2
SATCITRCNL

SEQ ID NO: 3622 - protein, 10 aa, Severe acute respiratory syndrome coronavirus 2
AVCRHHANEY

SEQ ID NO: 3623 - protein, 10 aa, Severe acute respiratory syndrome coronavirus 2
RHHANEYRLY

SEQ ID NO: 3624 - protein, 9 aa, Severe acute respiratory syndrome coronavirus 2
HHANEYRLY

SEQ ID NO: 3625 - protein, 9 aa, Severe acute respiratory syndrome coronavirus 2
HANEYRLYL

SEQ ID NO: 3626 - protein, 10 aa, Severe acute respiratory syndrome coronavirus 2
NEYRLYLDAY

SEQ ID NO: 3627 - protein, 10 aa, Severe acute respiratory syndrome coronavirus 2
EYRLYLDAYN

SEQ ID NO: 3628 - protein, 9 aa, Severe acute respiratory syndrome coronavirus 2
RLYLDAYNM

SEQ ID NO: 3629 - protein, 10 aa, Severe acute respiratory syndrome coronavirus 2
RLYLDAYNMM

SEQ ID NO: 3630 - protein, 9 aa, Severe acute respiratory syndrome coronavirus 2
LYLDAYNMM

SEQ ID NO: 3631 - protein, 10 aa, Severe acute respiratory syndrome coronavirus 2
LYLDAYNMMI

SEQ ID NO: 3632 - protein, 9 aa, Severe acute respiratory syndrome coronavirus 2
YLDAYNMMI

SEQ ID NO: 3633 - protein, 10 aa, Severe acute respiratory syndrome coronavirus 2
YLDAYNMMIS

SEQ ID NO: 3634 - protein, 10 aa, Severe acute respiratory syndrome coronavirus 2
AYNMMISAGF

SEQ ID NO: 3635 - protein, 9 aa, Severe acute respiratory syndrome coronavirus 2
YNMMISAGF

SEQ ID NO: 3636 - protein, 10 aa, Severe acute respiratory syndrome coronavirus 2
NMMISAGFSL

SEQ ID NO: 3637 - protein, 9 aa, Severe acute respiratory syndrome coronavirus 2
MMISAGFSL

SEQ ID NO: 3638 - protein, 10 aa, Severe acute respiratory syndrome coronavirus 2
MMISAGFSLW

SEQ ID NO: 3639 - protein, 9 aa, Severe acute respiratory syndrome coronavirus 2
MISAGFSLW

SEQ ID NO: 3640 - protein, 10 aa, Severe acute respiratory syndrome coronavirus 2
MISAGFSLWV

SEQ ID NO: 3641 - protein, 9 aa, Severe acute respiratory syndrome coronavirus 2
ISAGFSLWV

SEQ ID NO: 3642 - protein, 10 aa, Severe acute respiratory syndrome coronavirus 2
ISAGFSLWVY

SEQ ID NO: 3643 - protein, 9 aa, Severe acute respiratory syndrome coronavirus 2
SAGFSLWVY

SEQ ID NO: 3644 - protein, 10 aa, Severe acute respiratory syndrome coronavirus 2
SAGFSLWVYK

SEQ ID NO: 3645 - protein, 9 aa, Severe acute respiratory syndrome coronavirus 2
AGFSLWVYK

SEQ ID NO: 3646 - protein, 10 aa, Severe acute respiratory syndrome coronavirus 2
GFSLWVYKQF

SEQ ID NO: 3647 - protein, 9 aa, Severe acute respiratory syndrome coronavirus 2
FSLWVYKQF

SEQ ID NO: 3648 - protein, 10 aa, Severe acute respiratory syndrome coronavirus 2
LWVYKQFDTY

SEQ ID NO: 3649 - protein, 9 aa, Severe acute respiratory syndrome coronavirus 2
WVYKQFDTY

SEQ ID NO: 3650 - protein, 9 aa, Severe acute respiratory syndrome coronavirus 2
VYKQFDTYN

SEQ ID NO: 3651 - protein, 10 aa, Severe acute respiratory syndrome coronavirus 2
VYKQFDTYNL

SEQ ID NO: 3652 - protein, 10 aa, Severe acute respiratory syndrome coronavirus 2
YKQFDTYNLW

SEQ ID NO: 3653 - protein, 10 aa, Severe acute respiratory syndrome coronavirus 2
KQFDTYNLWN

SEQ ID NO: 3654 - protein, 10 aa, Severe acute respiratory syndrome coronavirus 2
QFDTYNLWNT

SEQ ID NO: 3655 - protein, 10 aa, Severe acute respiratory syndrome coronavirus 2
FDTYNLWNTF

SEQ ID NO: 3656 - protein, 9 aa, Severe acute respiratory syndrome coronavirus 2
DTYNLWNTF

SEQ ID NO: 3657 - protein, 9 aa, Severe acute respiratory syndrome coronavirus 2
TYNLWNTFT

SEQ ID NO: 3658 - protein, 10 aa, Severe acute respiratory syndrome coronavirus 2
TYNLWNTFTR

SEQ ID NO: 3659 - protein, 10 aa, Severe acute respiratory syndrome coronavirus 2
YNLWNTFTRL

SEQ ID NO: 3660 - protein, 9 aa, Severe acute respiratory syndrome coronavirus 2
NLWNTFTRL

SEQ ID NO: 3661 - protein, 9 aa, Severe acute respiratory syndrome coronavirus 2
LWNTFTRLQ

SEQ ID NO: 3662 - protein, 9 aa, Severe acute respiratory syndrome coronavirus 2
SLENVAFNV

SEQ ID NO: 3663 - protein, 10 aa, Severe acute respiratory syndrome coronavirus 2
SLENVAFNVV

SEQ ID NO: 3664 - protein, 9 aa, Severe acute respiratory syndrome coronavirus 2
LENVAFNVV

SEQ ID NO: 3665 - protein, 9 aa, Severe acute respiratory syndrome coronavirus 2
NVAFNVVNK

SEQ ID NO: 3666 - protein, 10 aa, Severe acute respiratory syndrome coronavirus 2
AFNVVNKGHF

SEQ ID NO: 3667 - protein, 10 aa, Severe acute respiratory syndrome coronavirus 2
QQGEVPVSII

SEQ ID NO: 3668 - protein, 10 aa, Severe acute respiratory syndrome coronavirus 2
VPVSIINNTV

SEQ ID NO: 3669 - protein, 9 aa, Severe acute respiratory syndrome coronavirus 2
PVSIINNTV

SEQ ID NO: 3670 - protein, 10 aa, Severe acute respiratory syndrome coronavirus 2
PVSIINNTVY

SEQ ID NO: 3671 - protein, 9 aa, Severe acute respiratory syndrome coronavirus 2
VSIINNTVY

SEQ ID NO: 3672 - protein, 9 aa, Severe acute respiratory syndrome coronavirus 2
SIINNTVYT

SEQ ID NO: 3673 - protein, 10 aa, Severe acute respiratory syndrome coronavirus 2
SIINNTVYTK

SEQ ID NO: 3674 - protein, 9 aa, Severe acute respiratory syndrome coronavirus 2
IINNTVYTK

SEQ ID NO: 3675 - protein, 10 aa, Severe acute respiratory syndrome coronavirus 2
IINNTVYTKV

SEQ ID NO: 3676 - protein, 9 aa, Severe acute respiratory syndrome coronavirus 2
TVYTKVDGV

SEQ ID NO: 3677 - protein, 9 aa, Severe acute respiratory syndrome coronavirus 2
KVDGVDVEL

SEQ ID NO: 3678 - protein, 10 aa, Severe acute respiratory syndrome coronavirus 2
KVDGVDVELF

SEQ ID NO: 3679 - protein, 10 aa, Severe acute respiratory syndrome coronavirus 2
GVDVELFENK

SEQ ID NO: 3680 - protein, 9 aa, Severe acute respiratory syndrome coronavirus 2
VELFENKTT

SEQ ID NO: 3681 - protein, 10 aa, Severe acute respiratory syndrome coronavirus 2
VELFENKTTL

SEQ ID NO: 3682 - protein, 9 aa, Severe acute respiratory syndrome coronavirus 2
FENKTTLPV

SEQ ID NO: 3683 - protein, 9 aa, Severe acute respiratory syndrome coronavirus 2
TTLPVNVAF

SEQ ID NO: 3684 - protein, 10 aa, Severe acute respiratory syndrome coronavirus 2
TLPVNVAFEL

SEQ ID NO: 3685 - protein, 9 aa, Severe acute respiratory syndrome coronavirus 2
LPVNVAFEL

SEQ ID NO: 3686 - protein, 10 aa, Severe acute respiratory syndrome coronavirus 2
LPVNVAFELW

SEQ ID NO: 3687 - protein, 9 aa, Severe acute respiratory syndrome coronavirus 2
VAFELWAKR

SEQ ID NO: 3688 - protein, 9 aa, Severe acute respiratory syndrome coronavirus 2
FELWAKRNI

SEQ ID NO: 3689 - protein, 9 aa, Severe acute respiratory syndrome coronavirus 2
ELWAKRNIK

SEQ ID NO: 3690 - protein, 9 aa, Severe acute respiratory syndrome coronavirus 2
WAKRNIKPV

SEQ ID NO: 3691 - protein, 9 aa, Severe acute respiratory syndrome coronavirus 2
KPVPEVKIL

SEQ ID NO: 3692 - protein, 10 aa, Severe acute respiratory syndrome coronavirus 2
VPEVKILNNL

SEQ ID NO: 3693 - protein, 10 aa, Severe acute respiratory syndrome coronavirus 2
PEVKILNNLG

SEQ ID NO: 3694 - protein, 10 aa, Severe acute respiratory syndrome coronavirus 2
KILNNLGVDI

SEQ ID NO: 3695 - protein, 9 aa, Severe acute respiratory syndrome coronavirus 2
ILNNLGVDI

SEQ ID NO: 3696 - protein, 9 aa, Severe acute respiratory syndrome coronavirus 2
GVDIAANTV

SEQ ID NO: 3697 - protein, 9 aa, Severe acute respiratory syndrome coronavirus 2
VDIAANTVI

SEQ ID NO: 3698 - protein, 10 aa, Severe acute respiratory syndrome coronavirus 2
IAANTVIWDY

SEQ ID NO: 3699 - protein, 9 aa, Severe acute respiratory syndrome coronavirus 2
AANTVIWDY

SEQ ID NO: 3700 - protein, 10 aa, Severe acute respiratory syndrome coronavirus 2
AANTVIWDYK

SEQ ID NO: 3701 - protein, 10 aa, Severe acute respiratory syndrome coronavirus 2
DYKRDAPAHI

SEQ ID NO: 3702 - protein, 10 aa, Severe acute respiratory syndrome coronavirus 2
RDAPAHISTI

SEQ ID NO: 3703 - protein, 9 aa, Severe acute respiratory syndrome coronavirus 2
APAHISTIG

SEQ ID NO: 3704 - protein, 10 aa, Severe acute respiratory syndrome coronavirus 2
APAHISTIGV

SEQ ID NO: 3705 - protein, 10 aa, Severe acute respiratory syndrome coronavirus 2
HISTIGVCSM

SEQ ID NO: 3706 - protein, 10 aa, Severe acute respiratory syndrome coronavirus 2
STIGVCSMTD

SEQ ID NO: 3707 - protein, 10 aa, Severe acute respiratory syndrome coronavirus 2
GVCSMTDIAK

SEQ ID NO: 3708 - protein, 9 aa, Severe acute respiratory syndrome coronavirus 2
CSMTDIAKK

SEQ ID NO: 3709 - protein, 10 aa, Severe acute respiratory syndrome coronavirus 2
MTDIAKKPTE

SEQ ID NO: 3710 - protein, 10 aa, Severe acute respiratory syndrome coronavirus 2
KPTETICAPL

SEQ ID NO: 3711 - protein, 9 aa, Severe acute respiratory syndrome coronavirus 2
TETICAPLT

SEQ ID NO: 3712 - protein, 10 aa, Severe acute respiratory syndrome coronavirus 2
TETICAPLTV

SEQ ID NO: 3713 - protein, 9 aa, Severe acute respiratory syndrome coronavirus 2
ETICAPLTV

SEQ ID NO: 3714 - protein, 10 aa, Severe acute respiratory syndrome coronavirus 2
TICAPLTVFF

SEQ ID NO: 3715 - protein, 9 aa, Severe acute respiratory syndrome coronavirus 2
ICAPLTVFF

SEQ ID NO: 3716 - protein, 9 aa, Severe acute respiratory syndrome coronavirus 2
LTVFFDGRV

SEQ ID NO: 3717 - protein, 9 aa, Severe acute respiratory syndrome coronavirus 2
RVDGQVDLF

SEQ ID NO: 3718 - protein, 10 aa, Severe acute respiratory syndrome coronavirus 2
RVDGQVDLFR

SEQ ID NO: 3719 - protein, 10 aa, Severe acute respiratory syndrome coronavirus 2
QVDLFRNARN

SEQ ID NO: 3720 - protein, 10 aa, Severe acute respiratory syndrome coronavirus 2
LFRNARNGVL

SEQ ID NO: 3721 - protein, 10 aa, Severe acute respiratory syndrome coronavirus 2
FRNARNGVLI

SEQ ID NO: 3722 - protein, 10 aa, Severe acute respiratory syndrome coronavirus 2
GVLITEGSVK

SEQ ID NO: 3723 - protein, 9 aa, Severe acute respiratory syndrome coronavirus 2
VLITEGSVK

SEQ ID NO: 3724 - protein, 9 aa, Severe acute respiratory syndrome coronavirus 2
ITEGSVKGL

SEQ ID NO: 3725 - protein, 10 aa, Severe acute respiratory syndrome coronavirus 2
ITEGSVKGLQ

SEQ ID NO: 3726 - protein, 10 aa, Severe acute respiratory syndrome coronavirus 2
TEGSVKGLQP

SEQ ID NO: 3727 - protein, 9 aa, Severe acute respiratory syndrome coronavirus 2
SVKGLQPSV

SEQ ID NO: 3728 - protein, 9 aa, Severe acute respiratory syndrome coronavirus 2
GLQPSVGPK

SEQ ID NO: 3729 - protein, 9 aa, Severe acute respiratory syndrome coronavirus 2
GPKQASLNG

SEQ ID NO: 3730 - protein, 10 aa, Severe acute respiratory syndrome coronavirus 2
GPKQASLNGV

SEQ ID NO: 3731 - protein, 10 aa, Severe acute respiratory syndrome coronavirus 2
KQASLNGVTL

SEQ ID NO: 3732 - protein, 9 aa, Severe acute respiratory syndrome coronavirus 2
QASLNGVTL

SEQ ID NO: 3733 - protein, 10 aa, Severe acute respiratory syndrome coronavirus 2
SLNGVTLIGE

SEQ ID NO: 3734 - protein, 9 aa, Severe acute respiratory syndrome coronavirus 2
VTLIGEAVK

SEQ ID NO: 3735 - protein, 9 aa, Severe acute respiratory syndrome coronavirus 2
GEAVKTQFN

SEQ ID NO: 3736 - protein, 10 aa, Severe acute respiratory syndrome coronavirus 2
GEAVKTQFNY

SEQ ID NO: 3737 - protein, 10 aa, Severe acute respiratory syndrome coronavirus 2
EAVKTQFNYY

SEQ ID NO: 3738 - protein, 9 aa, Severe acute respiratory syndrome coronavirus 2
AVKTQFNYY

SEQ ID NO: 3739 - protein, 10 aa, Severe acute respiratory syndrome coronavirus 2
AVKTQFNYYK

SEQ ID NO: 3740 - protein, 10 aa, Severe acute respiratory syndrome coronavirus 2
VKTQFNYYKK

SEQ ID NO: 3741 - protein, 9 aa, Severe acute respiratory syndrome coronavirus 2
KTQFNYYKK

SEQ ID NO: 3742 - protein, 9 aa, Severe acute respiratory syndrome coronavirus 2
TQFNYYKKV

SEQ ID NO: 3743 - protein, 9 aa, Severe acute respiratory syndrome coronavirus 2
NYYKKVDGV

SEQ ID NO: 3744 - protein, 10 aa, Severe acute respiratory syndrome coronavirus 2
NYYKKVDGVV

SEQ ID NO: 3745 - protein, 9 aa, Severe acute respiratory syndrome coronavirus 2
YYKKVDGVV

SEQ ID NO: 3746 - protein, 10 aa, Severe acute respiratory syndrome coronavirus 2
YYKKVDGVVQ

SEQ ID NO: 3747 - protein, 9 aa, Severe acute respiratory syndrome coronavirus 2
KVDGVVQQL

SEQ ID NO: 3748 - protein, 10 aa, Severe acute respiratory syndrome coronavirus 2
KVDGVVQQLP

SEQ ID NO: 3749 - protein, 9 aa, Severe acute respiratory syndrome coronavirus 2
VVQQLPETY

SEQ ID NO: 3750 - protein, 10 aa, Severe acute respiratory syndrome coronavirus 2
VVQQLPETYF

SEQ ID NO: 3751 - protein, 9 aa, Severe acute respiratory syndrome coronavirus 2
TYFTQSRNL

SEQ ID NO: 3752 - protein, 10 aa, Severe acute respiratory syndrome coronavirus 2
FTQSRNLQEF

SEQ ID NO: 3753 - protein, 10 aa, Severe acute respiratory syndrome coronavirus 2
TQSRNLQEFK

SEQ ID NO: 3754 - protein, 9 aa, Severe acute respiratory syndrome coronavirus 2
QSRNLQEFK

SEQ ID NO: 3755 - protein, 9 aa, Severe acute respiratory syndrome coronavirus 2
QEFKPRSQM

SEQ ID NO: 3756 - protein, 10 aa, Severe acute respiratory syndrome coronavirus 2
EFKPRSQMEI

SEQ ID NO: 3757 - protein, 10 aa, Severe acute respiratory syndrome coronavirus 2
KPRSQMEIDF

SEQ ID NO: 3758 - protein, 10 aa, Severe acute respiratory syndrome coronavirus 2
SQMEIDFLEL

SEQ ID NO: 3759 - protein, 9 aa, Severe acute respiratory syndrome coronavirus 2
QMEIDFLEL

SEQ ID NO: 3760 - protein, 10 aa, Severe acute respiratory syndrome coronavirus 2
QMEIDFLELA

SEQ ID NO: 3761 - protein, 9 aa, Severe acute respiratory syndrome coronavirus 2
MEIDFLELA

SEQ ID NO: 3762 - protein, 10 aa, Severe acute respiratory syndrome coronavirus 2
MEIDFLELAM

SEQ ID NO: 3763 - protein, 10 aa, Severe acute respiratory syndrome coronavirus 2
FLELAMDEFI

SEQ ID NO: 3764 - protein, 9 aa, Severe acute respiratory syndrome coronavirus 2
LELAMDEFI

SEQ ID NO: 3765 - protein, 10 aa, Severe acute respiratory syndrome coronavirus 2
LAMDEFIERY

SEQ ID NO: 3766 - protein, 9 aa, Severe acute respiratory syndrome coronavirus 2
AMDEFIERY

SEQ ID NO: 3767 - protein, 10 aa, Severe acute respiratory syndrome coronavirus 2
AMDEFIERYK

SEQ ID NO: 3768 - protein, 10 aa, Severe acute respiratory syndrome coronavirus 2
MDEFIERYKL

SEQ ID NO: 3769 - protein, 9 aa, Severe acute respiratory syndrome coronavirus 2
DEFIERYKL

SEQ ID NO: 3770 - protein, 10 aa, Severe acute respiratory syndrome coronavirus 2
FIERYKLEGY

SEQ ID NO: 3771 - protein, 9 aa, Severe acute respiratory syndrome coronavirus 2
IERYKLEGY

SEQ ID NO: 3772 - protein, 10 aa, Severe acute respiratory syndrome coronavirus 2
IERYKLEGYA

SEQ ID NO: 3773 - protein, 10 aa, Severe acute respiratory syndrome coronavirus 2
ERYKLEGYAF

SEQ ID NO: 3774 - protein, 9 aa, Severe acute respiratory syndrome coronavirus 2
RYKLEGYAF

SEQ ID NO: 3775 - protein, 9 aa, Severe acute respiratory syndrome coronavirus 2
KLEGYAFEH

SEQ ID NO: 3776 - protein, 10 aa, Severe acute respiratory syndrome coronavirus 2
KLEGYAFEHI

SEQ ID NO: 3777 - protein, 9 aa, Severe acute respiratory syndrome coronavirus 2
GYAFEHIVY

SEQ ID NO: 3778 - protein, 9 aa, Severe acute respiratory syndrome coronavirus 2
FEHIVYGDF

SEQ ID NO: 3779 - protein, 9 aa, Severe acute respiratory syndrome coronavirus 2
IVYGDFSHS

SEQ ID NO: 3780 - protein, 9 aa, Severe acute respiratory syndrome coronavirus 2
VYGDFSHSQ

SEQ ID NO: 3781 - protein, 10 aa, Severe acute respiratory syndrome coronavirus 2
VYGDFSHSQL

SEQ ID NO: 3782 - protein, 10 aa, Severe acute respiratory syndrome coronavirus 2
YGDFSHSQLG

SEQ ID NO: 3783 - protein, 10 aa, Severe acute respiratory syndrome coronavirus 2
DFSHSQLGGL

SEQ ID NO: 3784 - protein, 10 aa, Severe acute respiratory syndrome coronavirus 2
SHSQLGGLHL

SEQ ID NO: 3785 - protein, 9 aa, Severe acute respiratory syndrome coronavirus 2
HSQLGGLHL

SEQ ID NO: 3786 - protein, 10 aa, Severe acute respiratory syndrome coronavirus 2
HSQLGGLHLL

SEQ ID NO: 3787 - protein, 10 aa, Severe acute respiratory syndrome coronavirus 2
SQLGGLHLLI

SEQ ID NO: 3788 - protein, 9 aa, Severe acute respiratory syndrome coronavirus 2
QLGGLHLLI

SEQ ID NO: 3789 - protein, 10 aa, Severe acute respiratory syndrome coronavirus 2
GLHLLIGLAK

SEQ ID NO: 3790 - protein, 10 aa, Severe acute respiratory syndrome coronavirus 2
LLIGLAKRFK

SEQ ID NO: 3791 - protein, 10 aa, Severe acute respiratory syndrome coronavirus 2
RFKESPFELE

SEQ ID NO: 3792 - protein, 10 aa, Severe acute respiratory syndrome coronavirus 2
KESPFELEDF

SEQ ID NO: 3793 - protein, 9 aa, Severe acute respiratory syndrome coronavirus 2
FELEDFIPM

SEQ ID NO: 3794 - protein, 10 aa, Severe acute respiratory syndrome coronavirus 2
ELEDFIPMDS

SEQ ID NO: 3795 - protein, 9 aa, Severe acute respiratory syndrome coronavirus 2
IPMDSTVKN

SEQ ID NO: 3796 - protein, 10 aa, Severe acute respiratory syndrome coronavirus 2
IPMDSTVKNY

SEQ ID NO: 3797 - protein, 9 aa, Severe acute respiratory syndrome coronavirus 2
PMDSTVKNY

SEQ ID NO: 3798 - protein, 10 aa, Severe acute respiratory syndrome coronavirus 2
PMDSTVKNYF

SEQ ID NO: 3799 - protein, 10 aa, Severe acute respiratory syndrome coronavirus 2
MDSTVKNYFI

SEQ ID NO: 3800 - protein, 10 aa, Severe acute respiratory syndrome coronavirus 2
NYFITDAQTG

SEQ ID NO: 3801 - protein, 9 aa, Severe acute respiratory syndrome coronavirus 2
ITDAQTGSS

SEQ ID NO: 3802 - protein, 10 aa, Severe acute respiratory syndrome coronavirus 2
ITDAQTGSSK

SEQ ID NO: 3803 - protein, 9 aa, Severe acute respiratory syndrome coronavirus 2
GSSKCVCSV

SEQ ID NO: 3804 - protein, 10 aa, Severe acute respiratory syndrome coronavirus 2
GSSKCVCSVI

SEQ ID NO: 3805 - protein, 10 aa, Severe acute respiratory syndrome coronavirus 2
SSKCVCSVID

SEQ ID NO: 3806 - protein, 9 aa, Severe acute respiratory syndrome coronavirus 2
CVCSVIDLL

SEQ ID NO: 3807 - protein, 10 aa, Severe acute respiratory syndrome coronavirus 2
CVCSVIDLLL

SEQ ID NO: 3808 - protein, 9 aa, Severe acute respiratory syndrome coronavirus 2
VCSVIDLLL

SEQ ID NO: 3809 - protein, 10 aa, Severe acute respiratory syndrome coronavirus 2
VIDLLLDDFV

SEQ ID NO: 3810 - protein, 10 aa, Severe acute respiratory syndrome coronavirus 2
DLLLDDFVEI

SEQ ID NO: 3811 - protein, 10 aa, Severe acute respiratory syndrome coronavirus 2
LLLDDFVEII

SEQ ID NO: 3812 - protein, 9 aa, Severe acute respiratory syndrome coronavirus 2
LLDDFVEII

SEQ ID NO: 3813 - protein, 10 aa, Severe acute respiratory syndrome coronavirus 2
LLDDFVEIIK

SEQ ID NO: 3814 - protein, 10 aa, Severe acute respiratory syndrome coronavirus 2
FVEIIKSQDL

SEQ ID NO: 3815 - protein, 9 aa, Severe acute respiratory syndrome coronavirus 2
VEIIKSQDL

SEQ ID NO: 3816 - protein, 9 aa, Severe acute respiratory syndrome coronavirus 2
IIKSQDLSV

SEQ ID NO: 3817 - protein, 10 aa, Severe acute respiratory syndrome coronavirus 2
KSQDLSVVSK

SEQ ID NO: 3818 - protein, 9 aa, Severe acute respiratory syndrome coronavirus 2
SVVSKVVKV

SEQ ID NO: 3819 - protein, 10 aa, Severe acute respiratory syndrome coronavirus 2
VVSKVVKVTI

SEQ ID NO: 3820 - protein, 10 aa, Severe acute respiratory syndrome coronavirus 2
SKVVKVTIDY

SEQ ID NO: 3821 - protein, 9 aa, Severe acute respiratory syndrome coronavirus 2
KVVKVTIDY

SEQ ID NO: 3822 - protein, 10 aa, Severe acute respiratory syndrome coronavirus 2
TIDYTEISFM

SEQ ID NO: 3823 - protein, 10 aa, Severe acute respiratory syndrome coronavirus 2
IDYTEISFML

SEQ ID NO: 3824 - protein, 9 aa, Severe acute respiratory syndrome coronavirus 2
DYTEISFML

SEQ ID NO: 3825 - protein, 10 aa, Severe acute respiratory syndrome coronavirus 2
DYTEISFMLW

SEQ ID NO: 3826 - protein, 9 aa, Severe acute respiratory syndrome coronavirus 2
YTEISFMLW

SEQ ID NO: 3827 - protein, 10 aa, Severe acute respiratory syndrome coronavirus 2
YTEISFMLWC

SEQ ID NO: 3828 - protein, 9 aa, Severe acute respiratory syndrome coronavirus 2
TEISFMLWC

SEQ ID NO: 3829 - protein, 10 aa, Severe acute respiratory syndrome coronavirus 2
TEISFMLWCK

SEQ ID NO: 3830 - protein, 9 aa, Severe acute respiratory syndrome coronavirus 2
EISFMLWCK

SEQ ID NO: 3831 - protein, 9 aa, Severe acute respiratory syndrome coronavirus 2
SFMLWCKDG

SEQ ID NO: 3832 - protein, 10 aa, Severe acute respiratory syndrome coronavirus 2
SFMLWCKDGH

SEQ ID NO: 3833 - protein, 10 aa, Severe acute respiratory syndrome coronavirus 2
FMLWCKDGHV

SEQ ID NO: 3834 - protein, 9 aa, Severe acute respiratory syndrome coronavirus 2
MLWCKDGHV

SEQ ID NO: 3835 - protein, 10 aa, Severe acute respiratory syndrome coronavirus 2
LWCKDGHVET

SEQ ID NO: 3836 - protein, 10 aa, Severe acute respiratory syndrome coronavirus 2
WCKDGHVETF

SEQ ID NO: 3837 - protein, 10 aa, Severe acute respiratory syndrome coronavirus 2
CKDGHVETFY

SEQ ID NO: 3838 - protein, 10 aa, Severe acute respiratory syndrome coronavirus 2
HVETFYPKLQ

SEQ ID NO: 3839 - protein, 9 aa, Severe acute respiratory syndrome coronavirus 2
VLCNSQTSL

SEQ ID NO: 3840 - protein, 10 aa, Severe acute respiratory syndrome coronavirus 2
VLCNSQTSLR

SEQ ID NO: 3841 - protein, 9 aa, Severe acute respiratory syndrome coronavirus 2
TSLRCGACI

SEQ ID NO: 3842 - protein, 10 aa, Severe acute respiratory syndrome coronavirus 2
TSLRCGACIR

SEQ ID NO: 3843 - protein, 10 aa, Severe acute respiratory syndrome coronavirus 2
SLRCGACIRR

SEQ ID NO: 3844 - protein, 10 aa, Severe acute respiratory syndrome coronavirus 2
RCGACIRRPF

SEQ ID NO: 3845 - protein, 9 aa, Severe acute respiratory syndrome coronavirus 2
CGACIRRPF

SEQ ID NO: 3846 - protein, 9 aa, Severe acute respiratory syndrome coronavirus 2
GACIRRPFL

SEQ ID NO: 3847 - protein, 10 aa, Severe acute respiratory syndrome coronavirus 2
CIRRPFLCCK

SEQ ID NO: 3848 - protein, 9 aa, Severe acute respiratory syndrome coronavirus 2
RPFLCCKCC

SEQ ID NO: 3849 - protein, 10 aa, Severe acute respiratory syndrome coronavirus 2
RPFLCCKCCY

SEQ ID NO: 3850 - protein, 9 aa, Severe acute respiratory syndrome coronavirus 2
FLCCKCCYD

SEQ ID NO: 3851 - protein, 10 aa, Severe acute respiratory syndrome coronavirus 2
FLCCKCCYDH

SEQ ID NO: 3852 - protein, 10 aa, Severe acute respiratory syndrome coronavirus 2
CCKCCYDHVI

SEQ ID NO: 3853 - protein, 9 aa, Severe acute respiratory syndrome coronavirus 2
HVISTSHKL

SEQ ID NO: 3854 - protein, 10 aa, Severe acute respiratory syndrome coronavirus 2
STSHKLVLSV

SEQ ID NO: 3855 - protein, 9 aa, Severe acute respiratory syndrome coronavirus 2
KLVLSVNPY

SEQ ID NO: 3856 - protein, 10 aa, Severe acute respiratory syndrome coronavirus 2
KLVLSVNPYV

SEQ ID NO: 3857 - protein, 9 aa, Severe acute respiratory syndrome coronavirus 2
SVNPYVCNA

SEQ ID NO: 3858 - protein, 9 aa, Severe acute respiratory syndrome coronavirus 2
NPYVCNAPG

SEQ ID NO: 3859 - protein, 10 aa, Severe acute respiratory syndrome coronavirus 2
NPYVCNAPGC

SEQ ID NO: 3860 - protein, 10 aa, Severe acute respiratory syndrome coronavirus 2
YVCNAPGCDV

SEQ ID NO: 3861 - protein, 9 aa, Severe acute respiratory syndrome coronavirus 2
APGCDVTDV

SEQ ID NO: 3862 - protein, 9 aa, Severe acute respiratory syndrome coronavirus 2
CDVTDVTQL

SEQ ID NO: 3863 - protein, 9 aa, Severe acute respiratory syndrome coronavirus 2
DVTDVTQLY

SEQ ID NO: 3864 - protein, 9 aa, Severe acute respiratory syndrome coronavirus 2
VTDVTQLYL

SEQ ID NO: 3865 - protein, 10 aa, Severe acute respiratory syndrome coronavirus 2
VTDVTQLYLG

SEQ ID NO: 3866 - protein, 10 aa, Severe acute respiratory syndrome coronavirus 2
TQLYLGGMSY

SEQ ID NO: 3867 - protein, 9 aa, Severe acute respiratory syndrome coronavirus 2
QLYLGGMSY

SEQ ID NO: 3868 - protein, 10 aa, Severe acute respiratory syndrome coronavirus 2
QLYLGGMSYY

SEQ ID NO: 3869 - protein, 9 aa, Severe acute respiratory syndrome coronavirus 2
LYLGGMSYY

SEQ ID NO: 3870 - protein, 10 aa, Severe acute respiratory syndrome coronavirus 2
LYLGGMSYYC

SEQ ID NO: 3871 - protein, 9 aa, Severe acute respiratory syndrome coronavirus 2
YLGGMSYYC

SEQ ID NO: 3872 - protein, 10 aa, Severe acute respiratory syndrome coronavirus 2
YLGGMSYYCK

SEQ ID NO: 3873 - protein, 10 aa, Severe acute respiratory syndrome coronavirus 2
GMSYYCKSHK

SEQ ID NO: 3874 - protein, 9 aa, Severe acute respiratory syndrome coronavirus 2
MSYYCKSHK

SEQ ID NO: 3875 - protein, 10 aa, Severe acute respiratory syndrome coronavirus 2
MSYYCKSHKP

SEQ ID NO: 3876 - protein, 9 aa, Severe acute respiratory syndrome coronavirus 2
SYYCKSHKP

SEQ ID NO: 3877 - protein, 10 aa, Severe acute respiratory syndrome coronavirus 2
YYCKSHKPPI

SEQ ID NO: 3878 - protein, 10 aa, Severe acute respiratory syndrome coronavirus 2
KSHKPPISFP

SEQ ID NO: 3879 - protein, 9 aa, Severe acute respiratory syndrome coronavirus 2
HKPPISFPL

SEQ ID NO: 3880 - protein, 9 aa, Severe acute respiratory syndrome coronavirus 2
PPISFPLCA

SEQ ID NO: 3881 - protein, 9 aa, Severe acute respiratory syndrome coronavirus 2
FPLCANGQV

SEQ ID NO: 3882 - protein, 10 aa, Severe acute respiratory syndrome coronavirus 2
FPLCANGQVF

SEQ ID NO: 3883 - protein, 9 aa, Severe acute respiratory syndrome coronavirus 2
ANGQVFGLY

SEQ ID NO: 3884 - protein, 10 aa, Severe acute respiratory syndrome coronavirus 2
ANGQVFGLYK

SEQ ID NO: 3885 - protein, 9 aa, Severe acute respiratory syndrome coronavirus 2
FGLYKNTCV

SEQ ID NO: 3886 - protein, 10 aa, Severe acute respiratory syndrome coronavirus 2
GLYKNTCVGS

SEQ ID NO: 3887 - protein, 9 aa, Severe acute respiratory syndrome coronavirus 2
LYKNTCVGS

SEQ ID NO: 3888 - protein, 9 aa, Severe acute respiratory syndrome coronavirus 2
NTCVGSDNV

SEQ ID NO: 3889 - protein, 9 aa, Severe acute respiratory syndrome coronavirus 2
GSDNVTDFN

SEQ ID NO: 3890 - protein, 10 aa, Severe acute respiratory syndrome coronavirus 2
GSDNVTDFNA

SEQ ID NO: 3891 - protein, 10 aa, Severe acute respiratory syndrome coronavirus 2
SDNVTDFNAI

SEQ ID NO: 3892 - protein, 9 aa, Severe acute respiratory syndrome coronavirus 2
VTDFNAIAT

SEQ ID NO: 3893 - protein, 10 aa, Severe acute respiratory syndrome coronavirus 2
VTDFNAIATC

SEQ ID NO: 3894 - protein, 9 aa, Severe acute respiratory syndrome coronavirus 2
ATCDWTNAG

SEQ ID NO: 3895 - protein, 10 aa, Severe acute respiratory syndrome coronavirus 2
ATCDWTNAGD

SEQ ID NO: 3896 - protein, 10 aa, Severe acute respiratory syndrome coronavirus 2
TCDWTNAGDY

SEQ ID NO: 3897 - protein, 9 aa, Severe acute respiratory syndrome coronavirus 2
CDWTNAGDY

SEQ ID NO: 3898 - protein, 9 aa, Severe acute respiratory syndrome coronavirus 2
DWTNAGDYI

SEQ ID NO: 3899 - protein, 10 aa, Severe acute respiratory syndrome coronavirus 2
DWTNAGDYIL

SEQ ID NO: 3900 - protein, 9 aa, Severe acute respiratory syndrome coronavirus 2
WTNAGDYIL

SEQ ID NO: 3901 - protein, 10 aa, Severe acute respiratory syndrome coronavirus 2
YILANTCTER

SEQ ID NO: 3902 - protein, 9 aa, Severe acute respiratory syndrome coronavirus 2
ILANTCTER

SEQ ID NO: 3903 - protein, 10 aa, Severe acute respiratory syndrome coronavirus 2
ILANTCTERL

SEQ ID NO: 3904 - protein, 10 aa, Severe acute respiratory syndrome coronavirus 2
LANTCTERLK

SEQ ID NO: 3905 - protein, 10 aa, Severe acute respiratory syndrome coronavirus 2
NTCTERLKLF

SEQ ID NO: 3906 - protein, 9 aa, Severe acute respiratory syndrome coronavirus 2
CTERLKLFA

SEQ ID NO: 3907 - protein, 10 aa, Severe acute respiratory syndrome coronavirus 2
LKLFAAETLK

SEQ ID NO: 3908 - protein, 9 aa, Severe acute respiratory syndrome coronavirus 2
KLFAAETLK

SEQ ID NO: 3909 - protein, 10 aa, Severe acute respiratory syndrome coronavirus 2
KLFAAETLKA

SEQ ID NO: 3910 - protein, 10 aa, Severe acute respiratory syndrome coronavirus 2
AETLKATEET

SEQ ID NO: 3911 - protein, 10 aa, Severe acute respiratory syndrome coronavirus 2
ETLKATEETF

SEQ ID NO: 3912 - protein, 10 aa, Severe acute respiratory syndrome coronavirus 2
TLKATEETFK

SEQ ID NO: 3913 - protein, 9 aa, Severe acute respiratory syndrome coronavirus 2
ATEETFKLS

SEQ ID NO: 3914 - protein, 10 aa, Severe acute respiratory syndrome coronavirus 2
ATEETFKLSY

SEQ ID NO: 3915 - protein, 9 aa, Severe acute respiratory syndrome coronavirus 2
TEETFKLSY

SEQ ID NO: 3916 - protein, 10 aa, Severe acute respiratory syndrome coronavirus 2
TEETFKLSYG

SEQ ID NO: 3917 - protein, 9 aa, Severe acute respiratory syndrome coronavirus 2
EETFKLSYG

SEQ ID NO: 3918 - protein, 10 aa, Severe acute respiratory syndrome coronavirus 2
EETFKLSYGI

SEQ ID NO: 3919 - protein, 9 aa, Severe acute respiratory syndrome coronavirus 2
ETFKLSYGI

SEQ ID NO: 3920 - protein, 10 aa, Severe acute respiratory syndrome coronavirus 2
FKLSYGIATV

SEQ ID NO: 3921 - protein, 9 aa, Severe acute respiratory syndrome coronavirus 2
KLSYGIATV

SEQ ID NO: 3922 - protein, 10 aa, Severe acute respiratory syndrome coronavirus 2
KLSYGIATVR

SEQ ID NO: 3923 - protein, 9 aa, Severe acute respiratory syndrome coronavirus 2
LSYGIATVR

SEQ ID NO: 3924 - protein, 10 aa, Severe acute respiratory syndrome coronavirus 2
SYGIATVREV

SEQ ID NO: 3925 - protein, 10 aa, Severe acute respiratory syndrome coronavirus 2
ATVREVLSDR

SEQ ID NO: 3926 - protein, 9 aa, Severe acute respiratory syndrome coronavirus 2
REVLSDREL

SEQ ID NO: 3927 - protein, 10 aa, Severe acute respiratory syndrome coronavirus 2
REVLSDRELH

SEQ ID NO: 3928 - protein, 9 aa, Severe acute respiratory syndrome coronavirus 2
VLSDRELHL

SEQ ID NO: 3929 - protein, 10 aa, Severe acute respiratory syndrome coronavirus 2
VLSDRELHLS

SEQ ID NO: 3930 - protein, 9 aa, Severe acute respiratory syndrome coronavirus 2
LSDRELHLS

SEQ ID NO: 3931 - protein, 10 aa, Severe acute respiratory syndrome coronavirus 2
LSDRELHLSW

SEQ ID NO: 3932 - protein, 9 aa, Severe acute respiratory syndrome coronavirus 2
RELHLSWEV

SEQ ID NO: 3933 - protein, 10 aa, Severe acute respiratory syndrome coronavirus 2
RELHLSWEVG

SEQ ID NO: 3934 - protein, 9 aa, Severe acute respiratory syndrome coronavirus 2
LSWEVGKPR

SEQ ID NO: 3935 - protein, 10 aa, Severe acute respiratory syndrome coronavirus 2
WEVGKPRPPL

SEQ ID NO: 3936 - protein, 9 aa, Severe acute respiratory syndrome coronavirus 2
KPRPPLNRN

SEQ ID NO: 3937 - protein, 10 aa, Severe acute respiratory syndrome coronavirus 2
KPRPPLNRNY

SEQ ID NO: 3938 - protein, 9 aa, Severe acute respiratory syndrome coronavirus 2
RPPLNRNYV

SEQ ID NO: 3939 - protein, 10 aa, Severe acute respiratory syndrome coronavirus 2
RPPLNRNYVF

SEQ ID NO: 3940 - protein, 9 aa, Severe acute respiratory syndrome coronavirus 2
PPLNRNYVF

SEQ ID NO: 3941 - protein, 10 aa, Severe acute respiratory syndrome coronavirus 2
LNRNYVFTGY

SEQ ID NO: 3942 - protein, 9 aa, Severe acute respiratory syndrome coronavirus 2
NRNYVFTGY

SEQ ID NO: 3943 - protein, 9 aa, Severe acute respiratory syndrome coronavirus 2
RNYVFTGYR

SEQ ID NO: 3944 - protein, 9 aa, Severe acute respiratory syndrome coronavirus 2
NYVFTGYRV

SEQ ID NO: 3945 - protein, 10 aa, Severe acute respiratory syndrome coronavirus 2
YVFTGYRVTK

SEQ ID NO: 3946 - protein, 10 aa, Severe acute respiratory syndrome coronavirus 2
TGYRVTKNSK

SEQ ID NO: 3947 - protein, 9 aa, Severe acute respiratory syndrome coronavirus 2
NSKVQIGEY

SEQ ID NO: 3948 - protein, 10 aa, Severe acute respiratory syndrome coronavirus 2
SKVQIGEYTF

SEQ ID NO: 3949 - protein, 10 aa, Severe acute respiratory syndrome coronavirus 2
VQIGEYTFEK

SEQ ID NO: 3950 - protein, 9 aa, Severe acute respiratory syndrome coronavirus 2
QIGEYTFEK

SEQ ID NO: 3951 - protein, 10 aa, Severe acute respiratory syndrome coronavirus 2
GEYTFEKGDY

SEQ ID NO: 3952 - protein, 10 aa, Severe acute respiratory syndrome coronavirus 2
KGDYGDAVVY

SEQ ID NO: 3953 - protein, 10 aa, Severe acute respiratory syndrome coronavirus 2
AVVYRGTTTY

SEQ ID NO: 3954 - protein, 9 aa, Severe acute respiratory syndrome coronavirus 2
VVYRGTTTY

SEQ ID NO: 3955 - protein, 10 aa, Severe acute respiratory syndrome coronavirus 2
VVYRGTTTYK

SEQ ID NO: 3956 - protein, 9 aa, Severe acute respiratory syndrome coronavirus 2
VYRGTTTYK

SEQ ID NO: 3957 - protein, 10 aa, Severe acute respiratory syndrome coronavirus 2
VYRGTTTYKL

SEQ ID NO: 3958 - protein, 9 aa, Severe acute respiratory syndrome coronavirus 2
YRGTTTYKL

SEQ ID NO: 3959 - protein, 10 aa, Severe acute respiratory syndrome coronavirus 2
RGTTTYKLNV

SEQ ID NO: 3960 - protein, 9 aa, Severe acute respiratory syndrome coronavirus 2
GTTTYKLNV

SEQ ID NO: 3961 - protein, 10 aa, Severe acute respiratory syndrome coronavirus 2
TTYKLNVGDY

SEQ ID NO: 3962 - protein, 9 aa, Severe acute respiratory syndrome coronavirus 2
TYKLNVGDY

SEQ ID NO: 3963 - protein, 10 aa, Severe acute respiratory syndrome coronavirus 2
TYKLNVGDYF

SEQ ID NO: 3964 - protein, 9 aa, Severe acute respiratory syndrome coronavirus 2
YKLNVGDYF

SEQ ID NO: 3965 - protein, 10 aa, Severe acute respiratory syndrome coronavirus 2
YKLNVGDYFV

SEQ ID NO: 3966 - protein, 9 aa, Severe acute respiratory syndrome coronavirus 2
KLNVGDYFV

SEQ ID NO: 3967 - protein, 10 aa, Severe acute respiratory syndrome coronavirus 2
KLNVGDYFVL

SEQ ID NO: 3968 - protein, 10 aa, Severe acute respiratory syndrome coronavirus 2
GDYFVLTSHT

SEQ ID NO: 3969 - protein, 10 aa, Severe acute respiratory syndrome coronavirus 2
DYFVLTSHTV

SEQ ID NO: 3970 - protein, 9 aa, Severe acute respiratory syndrome coronavirus 2
YFVLTSHTV

SEQ ID NO: 3971 - protein, 10 aa, Severe acute respiratory syndrome coronavirus 2
YFVLTSHTVM

SEQ ID NO: 3972 - protein, 9 aa, Severe acute respiratory syndrome coronavirus 2
FVLTSHTVM

SEQ ID NO: 3973 - protein, 10 aa, Severe acute respiratory syndrome coronavirus 2
VLTSHTVMPL

SEQ ID NO: 3974 - protein, 9 aa, Severe acute respiratory syndrome coronavirus 2
LTSHTVMPL

SEQ ID NO: 3975 - protein, 10 aa, Severe acute respiratory syndrome coronavirus 2
TVMPLSAPTL

SEQ ID NO: 3976 - protein, 9 aa, Severe acute respiratory syndrome coronavirus 2
VMPLSAPTL

SEQ ID NO: 3977 - protein, 10 aa, Severe acute respiratory syndrome coronavirus 2
VMPLSAPTLV

SEQ ID NO: 3978 - protein, 10 aa, Severe acute respiratory syndrome coronavirus 2
MPLSAPTLVP

SEQ ID NO: 3979 - protein, 9 aa, Severe acute respiratory syndrome coronavirus 2
APTLVPQEH

SEQ ID NO: 3980 - protein, 10 aa, Severe acute respiratory syndrome coronavirus 2
APTLVPQEHY

SEQ ID NO: 3981 - protein, 9 aa, Severe acute respiratory syndrome coronavirus 2
PTLVPQEHY

SEQ ID NO: 3982 - protein, 9 aa, Severe acute respiratory syndrome coronavirus 2
TLVPQEHYV

SEQ ID NO: 3983 - protein, 9 aa, Severe acute respiratory syndrome coronavirus 2
VPQEHYVRI

SEQ ID NO: 3984 - protein, 9 aa, Severe acute respiratory syndrome coronavirus 2
QEHYVRITG

SEQ ID NO: 3985 - protein, 10 aa, Severe acute respiratory syndrome coronavirus 2
QEHYVRITGL

SEQ ID NO: 3986 - protein, 10 aa, Severe acute respiratory syndrome coronavirus 2
EHYVRITGLY

SEQ ID NO: 3987 - protein, 9 aa, Severe acute respiratory syndrome coronavirus 2
HYVRITGLY

SEQ ID NO: 3988 - protein, 9 aa, Severe acute respiratory syndrome coronavirus 2
RITGLYPTL

SEQ ID NO: 3989 - protein, 10 aa, Severe acute respiratory syndrome coronavirus 2
GLYPTLNISD

SEQ ID NO: 3990 - protein, 10 aa, Severe acute respiratory syndrome coronavirus 2
YPTLNISDEF

SEQ ID NO: 3991 - protein, 9 aa, Severe acute respiratory syndrome coronavirus 2
PTLNISDEF

SEQ ID NO: 3992 - protein, 10 aa, Severe acute respiratory syndrome coronavirus 2
NISDEFSSNV

SEQ ID NO: 3993 - protein, 10 aa, Severe acute respiratory syndrome coronavirus 2
ISDEFSSNVA

SEQ ID NO: 3994 - protein, 10 aa, Severe acute respiratory syndrome coronavirus 2
DEFSSNVANY

SEQ ID NO: 3995 - protein, 9 aa, Severe acute respiratory syndrome coronavirus 2
FSSNVANYQ

SEQ ID NO: 3996 - protein, 10 aa, Severe acute respiratory syndrome coronavirus 2
FSSNVANYQK

SEQ ID NO: 3997 - protein, 9 aa, Severe acute respiratory syndrome coronavirus 2
SSNVANYQK

SEQ ID NO: 3998 - protein, 10 aa, Severe acute respiratory syndrome coronavirus 2
ANYQKVGMQK

SEQ ID NO: 3999 - protein, 9 aa, Severe acute respiratory syndrome coronavirus 2
NYQKVGMQK

SEQ ID NO: 4000 - protein, 10 aa, Severe acute respiratory syndrome coronavirus 2
NYQKVGMQKY

SEQ ID NO: 4001 - protein, 9 aa, Severe acute respiratory syndrome coronavirus 2
YQKVGMQKY

SEQ ID NO: 4002 - protein, 10 aa, Severe acute respiratory syndrome coronavirus 2
GPPGTGKSHF

SEQ ID NO: 4003 - protein, 10 aa, Severe acute respiratory syndrome coronavirus 2
KSHFAIGLAL

SEQ ID NO: 4004 - protein, 9 aa, Severe acute respiratory syndrome coronavirus 2
SHFAIGLAL

SEQ ID NO: 4005 - protein, 10 aa, Severe acute respiratory syndrome coronavirus 2
SHFAIGLALY

SEQ ID NO: 4006 - protein, 9 aa, Severe acute respiratory syndrome coronavirus 2
HFAIGLALY

SEQ ID NO: 4007 - protein, 10 aa, Severe acute respiratory syndrome coronavirus 2
HFAIGLALYY

SEQ ID NO: 4008 - protein, 9 aa, Severe acute respiratory syndrome coronavirus 2
GLALYYPSA

SEQ ID NO: 4009 - protein, 10 aa, Severe acute respiratory syndrome coronavirus 2
GLALYYPSAR

SEQ ID NO: 4010 - protein, 9 aa, Severe acute respiratory syndrome coronavirus 2
ALYYPSARI

SEQ ID NO: 4011 - protein, 9 aa, Severe acute respiratory syndrome coronavirus 2
LYYPSARIV

SEQ ID NO: 4012 - protein, 10 aa, Severe acute respiratory syndrome coronavirus 2
LYYPSARIVY

SEQ ID NO: 4013 - protein, 9 aa, Severe acute respiratory syndrome coronavirus 2
YYPSARIVY

SEQ ID NO: 4014 - protein, 10 aa, Severe acute respiratory syndrome coronavirus 2
YYPSARIVYT

SEQ ID NO: 4015 - protein, 9 aa, Severe acute respiratory syndrome coronavirus 2
YPSARIVYT

SEQ ID NO: 4016 - protein, 10 aa, Severe acute respiratory syndrome coronavirus 2
YPSARIVYTA

SEQ ID NO: 4017 - protein, 9 aa, Severe acute respiratory syndrome coronavirus 2
IVYTACSHA

SEQ ID NO: 4018 - protein, 10 aa, Severe acute respiratory syndrome coronavirus 2
IVYTACSHAA

SEQ ID NO: 4019 - protein, 10 aa, Severe acute respiratory syndrome coronavirus 2
VYTACSHAAV

SEQ ID NO: 4020 - protein, 9 aa, Severe acute respiratory syndrome coronavirus 2
YTACSHAAV

SEQ ID NO: 4021 - protein, 10 aa, Severe acute respiratory syndrome coronavirus 2
HAAVDALCEK

SEQ ID NO: 4022 - protein, 10 aa, Severe acute respiratory syndrome coronavirus 2
ALCEKALKYL

SEQ ID NO: 4023 - protein, 10 aa, Severe acute respiratory syndrome coronavirus 2
KALKYLPIDK

SEQ ID NO: 4024 - protein, 9 aa, Severe acute respiratory syndrome coronavirus 2
ALKYLPIDK

SEQ ID NO: 4025 - protein, 9 aa, Severe acute respiratory syndrome coronavirus 2
KYLPIDKCS

SEQ ID NO: 4026 - protein, 10 aa, Severe acute respiratory syndrome coronavirus 2
YLPIDKCSRI

SEQ ID NO: 4027 - protein, 9 aa, Severe acute respiratory syndrome coronavirus 2
LPIDKCSRI

SEQ ID NO: 4028 - protein, 10 aa, Severe acute respiratory syndrome coronavirus 2
LPIDKCSRII

SEQ ID NO: 4029 - protein, 9 aa, Severe acute respiratory syndrome coronavirus 2
IPARARVEC

SEQ ID NO: 4030 - protein, 10 aa, Severe acute respiratory syndrome coronavirus 2
IPARARVECF

SEQ ID NO: 4031 - protein, 9 aa, Severe acute respiratory syndrome coronavirus 2
RARVECFDK

SEQ ID NO: 4032 - protein, 10 aa, Severe acute respiratory syndrome coronavirus 2
RARVECFDKF

SEQ ID NO: 4033 - protein, 9 aa, Severe acute respiratory syndrome coronavirus 2
RVECFDKFK

SEQ ID NO: 4034 - protein, 10 aa, Severe acute respiratory syndrome coronavirus 2
RVECFDKFKV

SEQ ID NO: 4035 - protein, 10 aa, Severe acute respiratory syndrome coronavirus 2
FDKFKVNSTL

SEQ ID NO: 4036 - protein, 10 aa, Severe acute respiratory syndrome coronavirus 2
FKVNSTLEQY

SEQ ID NO: 4037 - protein, 9 aa, Severe acute respiratory syndrome coronavirus 2
KVNSTLEQY

SEQ ID NO: 4038 - protein, 10 aa, Severe acute respiratory syndrome coronavirus 2
KVNSTLEQYV

SEQ ID NO: 4039 - protein, 10 aa, Severe acute respiratory syndrome coronavirus 2
VNSTLEQYVF

SEQ ID NO: 4040 - protein, 9 aa, Severe acute respiratory syndrome coronavirus 2
NSTLEQYVF

SEQ ID NO: 4041 - protein, 10 aa, Severe acute respiratory syndrome coronavirus 2
TLEQYVFCTV

SEQ ID NO: 4042 - protein, 10 aa, Severe acute respiratory syndrome coronavirus 2
EQYVFCTVNA

SEQ ID NO: 4043 - protein, 10 aa, Severe acute respiratory syndrome coronavirus 2
QYVFCTVNAL

SEQ ID NO: 4044 - protein, 9 aa, Severe acute respiratory syndrome coronavirus 2
YVFCTVNAL

SEQ ID NO: 4045 - protein, 10 aa, Severe acute respiratory syndrome coronavirus 2
VFCTVNALPE

SEQ ID NO: 4046 - protein, 9 aa, Severe acute respiratory syndrome coronavirus 2
ALPETTADI

SEQ ID NO: 4047 - protein, 9 aa, Severe acute respiratory syndrome coronavirus 2
LPETTADIV

SEQ ID NO: 4048 - protein, 10 aa, Severe acute respiratory syndrome coronavirus 2
LPETTADIVV

SEQ ID NO: 4049 - protein, 9 aa, Severe acute respiratory syndrome coronavirus 2
ETTADIVVF

SEQ ID NO: 4050 - protein, 9 aa, Severe acute respiratory syndrome coronavirus 2
TTADIVVFD

SEQ ID NO: 4051 - protein, 10 aa, Severe acute respiratory syndrome coronavirus 2
TADIVVFDEI

SEQ ID NO: 4052 - protein, 10 aa, Severe acute respiratory syndrome coronavirus 2
VVFDEISMAT

SEQ ID NO: 4053 - protein, 10 aa, Severe acute respiratory syndrome coronavirus 2
FDEISMATNY

SEQ ID NO: 4054 - protein, 9 aa, Severe acute respiratory syndrome coronavirus 2
DEISMATNY

SEQ ID NO: 4055 - protein, 10 aa, Severe acute respiratory syndrome coronavirus 2
DEISMATNYD

SEQ ID NO: 4056 - protein, 9 aa, Severe acute respiratory syndrome coronavirus 2
ISMATNYDL

SEQ ID NO: 4057 - protein, 10 aa, Severe acute respiratory syndrome coronavirus 2
SMATNYDLSV

SEQ ID NO: 4058 - protein, 9 aa, Severe acute respiratory syndrome coronavirus 2
MATNYDLSV

SEQ ID NO: 4059 - protein, 9 aa, Severe acute respiratory syndrome coronavirus 2
ATNYDLSVV

SEQ ID NO: 4060 - protein, 10 aa, Severe acute respiratory syndrome coronavirus 2
SVVNARLRAK

SEQ ID NO: 4061 - protein, 9 aa, Severe acute respiratory syndrome coronavirus 2
RLRAKHYVY

SEQ ID NO: 4062 - protein, 10 aa, Severe acute respiratory syndrome coronavirus 2
YVYIGDPAQL

SEQ ID NO: 4063 - protein, 9 aa, Severe acute respiratory syndrome coronavirus 2
VYIGDPAQL

SEQ ID NO: 4064 - protein, 9 aa, Severe acute respiratory syndrome coronavirus 2
AQLPAPRTL

SEQ ID NO: 4065 - protein, 10 aa, Severe acute respiratory syndrome coronavirus 2
AQLPAPRTLL

SEQ ID NO: 4066 - protein, 10 aa, Severe acute respiratory syndrome coronavirus 2
LPAPRTLLTK

SEQ ID NO: 4067 - protein, 9 aa, Severe acute respiratory syndrome coronavirus 2
APRTLLTKG

SEQ ID NO: 4068 - protein, 10 aa, Severe acute respiratory syndrome coronavirus 2
RTLLTKGTLE

SEQ ID NO: 4069 - protein, 10 aa, Severe acute respiratory syndrome coronavirus 2
LTKGTLEPEY

SEQ ID NO: 4070 - protein, 10 aa, Severe acute respiratory syndrome coronavirus 2
TLEPEYFNSV

SEQ ID NO: 4071 - protein, 9 aa, Severe acute respiratory syndrome coronavirus 2
LEPEYFNSV

SEQ ID NO: 4072 - protein, 10 aa, Severe acute respiratory syndrome coronavirus 2
PEYFNSVCRL

SEQ ID NO: 4073 - protein, 9 aa, Severe acute respiratory syndrome coronavirus 2
EYFNSVCRL

SEQ ID NO: 4074 - protein, 10 aa, Severe acute respiratory syndrome coronavirus 2
EYFNSVCRLM

SEQ ID NO: 4075 - protein, 9 aa, Severe acute respiratory syndrome coronavirus 2
YFNSVCRLM

SEQ ID NO: 4076 - protein, 10 aa, Severe acute respiratory syndrome coronavirus 2
YFNSVCRLMK

SEQ ID NO: 4077 - protein, 9 aa, Severe acute respiratory syndrome coronavirus 2
RLMKTIGPD

SEQ ID NO: 4078 - protein, 10 aa, Severe acute respiratory syndrome coronavirus 2
RLMKTIGPDM

SEQ ID NO: 4079 - protein, 9 aa, Severe acute respiratory syndrome coronavirus 2
LMKTIGPDM

SEQ ID NO: 4080 - protein, 10 aa, Severe acute respiratory syndrome coronavirus 2
LMKTIGPDMF

SEQ ID NO: 4081 - protein, 9 aa, Severe acute respiratory syndrome coronavirus 2
KTIGPDMFL

SEQ ID NO: 4082 - protein, 10 aa, Severe acute respiratory syndrome coronavirus 2
TIGPDMFLGT

SEQ ID NO: 4083 - protein, 10 aa, Severe acute respiratory syndrome coronavirus 2
MFLGTCRRCP

SEQ ID NO: 4084 - protein, 10 aa, Severe acute respiratory syndrome coronavirus 2
FLGTCRRCPA

SEQ ID NO: 4085 - protein, 9 aa, Severe acute respiratory syndrome coronavirus 2
TCRRCPAEI

SEQ ID NO: 4086 - protein, 10 aa, Severe acute respiratory syndrome coronavirus 2
TCRRCPAEIV

SEQ ID NO: 4087 - protein, 9 aa, Severe acute respiratory syndrome coronavirus 2
CPAEIVDTV

SEQ ID NO: 4088 - protein, 10 aa, Severe acute respiratory syndrome coronavirus 2
CPAEIVDTVS

SEQ ID NO: 4089 - protein, 10 aa, Severe acute respiratory syndrome coronavirus 2
AEIVDTVSAL

SEQ ID NO: 4090 - protein, 10 aa, Severe acute respiratory syndrome coronavirus 2
EIVDTVSALV

SEQ ID NO: 4091 - protein, 10 aa, Severe acute respiratory syndrome coronavirus 2
IVDTVSALVY

SEQ ID NO: 4092 - protein, 10 aa, Severe acute respiratory syndrome coronavirus 2
TVSALVYDNK

SEQ ID NO: 4093 - protein, 10 aa, Severe acute respiratory syndrome coronavirus 2
SALVYDNKLK

SEQ ID NO: 4094 - protein, 9 aa, Severe acute respiratory syndrome coronavirus 2
ALVYDNKLK

SEQ ID NO: 4095 - protein, 9 aa, Severe acute respiratory syndrome coronavirus 2
LVYDNKLKA

SEQ ID NO: 4096 - protein, 10 aa, Severe acute respiratory syndrome coronavirus 2
VYDNKLKAHK

SEQ ID NO: 4097 - protein, 10 aa, Severe acute respiratory syndrome coronavirus 2
HKDKSAQCFK

SEQ ID NO: 4098 - protein, 9 aa, Severe acute respiratory syndrome coronavirus 2
KDKSAQCFK

SEQ ID NO: 4099 - protein, 10 aa, Severe acute respiratory syndrome coronavirus 2
KDKSAQCFKM

SEQ ID NO: 4100 - protein, 9 aa, Severe acute respiratory syndrome coronavirus 2
KSAQCFKMF

SEQ ID NO: 4101 - protein, 10 aa, Severe acute respiratory syndrome coronavirus 2
KSAQCFKMFY

SEQ ID NO: 4102 - protein, 9 aa, Severe acute respiratory syndrome coronavirus 2
SAQCFKMFY

SEQ ID NO: 4103 - protein, 10 aa, Severe acute respiratory syndrome coronavirus 2
SAQCFKMFYK

SEQ ID NO: 4104 - protein, 9 aa, Severe acute respiratory syndrome coronavirus 2
AQCFKMFYK

SEQ ID NO: 4105 - protein, 10 aa, Severe acute respiratory syndrome coronavirus 2
CFKMFYKGVI

SEQ ID NO: 4106 - protein, 10 aa, Severe acute respiratory syndrome coronavirus 2
KMFYKGVITH

SEQ ID NO: 4107 - protein, 9 aa, Severe acute respiratory syndrome coronavirus 2
MFYKGVITH

SEQ ID NO: 4108 - protein, 10 aa, Severe acute respiratory syndrome coronavirus 2
MFYKGVITHD

SEQ ID NO: 4109 - protein, 9 aa, Severe acute respiratory syndrome coronavirus 2
FYKGVITHD

SEQ ID NO: 4110 - protein, 10 aa, Severe acute respiratory syndrome coronavirus 2
FYKGVITHDV

SEQ ID NO: 4111 - protein, 9 aa, Severe acute respiratory syndrome coronavirus 2
RPQIGVVRE

SEQ ID NO: 4112 - protein, 10 aa, Severe acute respiratory syndrome coronavirus 2
RPQIGVVREF

SEQ ID NO: 4113 - protein, 9 aa, Severe acute respiratory syndrome coronavirus 2
PQIGVVREF

SEQ ID NO: 4114 - protein, 10 aa, Severe acute respiratory syndrome coronavirus 2
REFLTRNPAW

SEQ ID NO: 4115 - protein, 9 aa, Severe acute respiratory syndrome coronavirus 2
EFLTRNPAW

SEQ ID NO: 4116 - protein, 9 aa, Severe acute respiratory syndrome coronavirus 2
FLTRNPAWR

SEQ ID NO: 4117 - protein, 10 aa, Severe acute respiratory syndrome coronavirus 2
FLTRNPAWRK

SEQ ID NO: 4118 - protein, 9 aa, Severe acute respiratory syndrome coronavirus 2
LTRNPAWRK

SEQ ID NO: 4119 - protein, 10 aa, Severe acute respiratory syndrome coronavirus 2
TRNPAWRKAV

SEQ ID NO: 4120 - protein, 10 aa, Severe acute respiratory syndrome coronavirus 2
RNPAWRKAVF

SEQ ID NO: 4121 - protein, 9 aa, Severe acute respiratory syndrome coronavirus 2
NPAWRKAVF

SEQ ID NO: 4122 - protein, 10 aa, Severe acute respiratory syndrome coronavirus 2
NPAWRKAVFI

SEQ ID NO: 4123 - protein, 10 aa, Severe acute respiratory syndrome coronavirus 2
AWRKAVFISP

SEQ ID NO: 4124 - protein, 9 aa, Severe acute respiratory syndrome coronavirus 2
RKAVFISPY

SEQ ID NO: 4125 - protein, 9 aa, Severe acute respiratory syndrome coronavirus 2
SPYNSQNAV

SEQ ID NO: 4126 - protein, 10 aa, Severe acute respiratory syndrome coronavirus 2
SPYNSQNAVA

SEQ ID NO: 4127 - protein, 10 aa, Severe acute respiratory syndrome coronavirus 2
NSQNAVASKI

SEQ ID NO: 4128 - protein, 10 aa, Severe acute respiratory syndrome coronavirus 2
SQNAVASKIL

SEQ ID NO: 4129 - protein, 9 aa, Severe acute respiratory syndrome coronavirus 2
AVASKILGL

SEQ ID NO: 4130 - protein, 9 aa, Severe acute respiratory syndrome coronavirus 2
KILGLPTQT

SEQ ID NO: 4131 - protein, 10 aa, Severe acute respiratory syndrome coronavirus 2
KILGLPTQTV

SEQ ID NO: 4132 - protein, 9 aa, Severe acute respiratory syndrome coronavirus 2
ILGLPTQTV

SEQ ID NO: 4133 - protein, 9 aa, Severe acute respiratory syndrome coronavirus 2
LPTQTVDSS

SEQ ID NO: 4134 - protein, 10 aa, Severe acute respiratory syndrome coronavirus 2
LPTQTVDSSQ

SEQ ID NO: 4135 - protein, 10 aa, Severe acute respiratory syndrome coronavirus 2
QTVDSSQGSE

SEQ ID NO: 4136 - protein, 10 aa, Severe acute respiratory syndrome coronavirus 2
TVDSSQGSEY

SEQ ID NO: 4137 - protein, 9 aa, Severe acute respiratory syndrome coronavirus 2
VDSSQGSEY

SEQ ID NO: 4138 - protein, 10 aa, Severe acute respiratory syndrome coronavirus 2
DSSQGSEYDY

SEQ ID NO: 4139 - protein, 9 aa, Severe acute respiratory syndrome coronavirus 2
SSQGSEYDY

SEQ ID NO: 4140 - protein, 10 aa, Severe acute respiratory syndrome coronavirus 2
SSQGSEYDYV

SEQ ID NO: 4141 - protein, 9 aa, Severe acute respiratory syndrome coronavirus 2
SQGSEYDYV

SEQ ID NO: 4142 - protein, 9 aa, Severe acute respiratory syndrome coronavirus 2
GSEYDYVIF

SEQ ID NO: 4143 - protein, 9 aa, Severe acute respiratory syndrome coronavirus 2
SEYDYVIFT

SEQ ID NO: 4144 - protein, 10 aa, Severe acute respiratory syndrome coronavirus 2
SEYDYVIFTQ

SEQ ID NO: 4145 - protein, 9 aa, Severe acute respiratory syndrome coronavirus 2
EYDYVIFTQ

SEQ ID NO: 4146 - protein, 9 aa, Severe acute respiratory syndrome coronavirus 2
DYVIFTQTT

SEQ ID NO: 4147 - protein, 10 aa, Severe acute respiratory syndrome coronavirus 2
DYVIFTQTTE

SEQ ID NO: 4148 - protein, 9 aa, Severe acute respiratory syndrome coronavirus 2
FTQTTETAH

SEQ ID NO: 4149 - protein, 10 aa, Severe acute respiratory syndrome coronavirus 2
FTQTTETAHS

SEQ ID NO: 4150 - protein, 9 aa, Severe acute respiratory syndrome coronavirus 2
TTETAHSCN

SEQ ID NO: 4151 - protein, 10 aa, Severe acute respiratory syndrome coronavirus 2
TTETAHSCNV

SEQ ID NO: 4152 - protein, 9 aa, Severe acute respiratory syndrome coronavirus 2
TETAHSCNV

SEQ ID NO: 4153 - protein, 9 aa, Severe acute respiratory syndrome coronavirus 2
HSCNVNRFN

SEQ ID NO: 4154 - protein, 10 aa, Severe acute respiratory syndrome coronavirus 2
HSCNVNRFNV

SEQ ID NO: 4155 - protein, 10 aa, Severe acute respiratory syndrome coronavirus 2
RFNVAITRAK

SEQ ID NO: 4156 - protein, 10 aa, Severe acute respiratory syndrome coronavirus 2
FNVAITRAKV

SEQ ID NO: 4157 - protein, 9 aa, Severe acute respiratory syndrome coronavirus 2
NVAITRAKV

SEQ ID NO: 4158 - protein, 9 aa, Severe acute respiratory syndrome coronavirus 2
ITRAKVGIL

SEQ ID NO: 4159 - protein, 9 aa, Severe acute respiratory syndrome coronavirus 2
RAKVGILCI

SEQ ID NO: 4160 - protein, 10 aa, Severe acute respiratory syndrome coronavirus 2
RAKVGILCIM

SEQ ID NO: 4161 - protein, 9 aa, Severe acute respiratory syndrome coronavirus 2
GILCIMSDR

SEQ ID NO: 4162 - protein, 10 aa, Severe acute respiratory syndrome coronavirus 2
ILCIMSDRDL

SEQ ID NO: 4163 - protein, 10 aa, Severe acute respiratory syndrome coronavirus 2
LCIMSDRDLY

SEQ ID NO: 4164 - protein, 9 aa, Severe acute respiratory syndrome coronavirus 2
CIMSDRDLY

SEQ ID NO: 4165 - protein, 9 aa, Severe acute respiratory syndrome coronavirus 2
IMSDRDLYD

SEQ ID NO: 4166 - protein, 10 aa, Severe acute respiratory syndrome coronavirus 2
IMSDRDLYDK

SEQ ID NO: 4167 - protein, 9 aa, Severe acute respiratory syndrome coronavirus 2
MSDRDLYDK

SEQ ID NO: 4168 - protein, 10 aa, Severe acute respiratory syndrome coronavirus 2
MSDRDLYDKL

SEQ ID NO: 4169 - protein, 10 aa, Severe acute respiratory syndrome coronavirus 2
DRDLYDKLQF

SEQ ID NO: 4170 - protein, 9 aa, Severe acute respiratory syndrome coronavirus 2
RDLYDKLQF

SEQ ID NO: 4171 - protein, 9 aa, Severe acute respiratory syndrome coronavirus 2
DLYDKLQFT

SEQ ID NO: 4172 - protein, 9 aa, Severe acute respiratory syndrome coronavirus 2
LYDKLQFTS

SEQ ID NO: 4173 - protein, 10 aa, Severe acute respiratory syndrome coronavirus 2
LYDKLQFTSL

SEQ ID NO: 4174 - protein, 9 aa, Severe acute respiratory syndrome coronavirus 2
KLQFTSLEI

SEQ ID NO: 4175 - protein, 10 aa, Severe acute respiratory syndrome coronavirus 2
TSLEIPRRNV

SEQ ID NO: 4176 - protein, 10 aa, Severe acute respiratory syndrome coronavirus 2
SLEIPRRNVA

SEQ ID NO: 4177 - protein, 10 aa, Severe acute respiratory syndrome coronavirus 2
LEIPRRNVAT

SEQ ID NO: 4178 - protein, 9 aa, Severe acute respiratory syndrome coronavirus 2
IPRRNVATL

SEQ ID NO: 4179 - protein, 10 aa, Severe acute respiratory syndrome coronavirus 2
IPRRNVATLQ

SEQ ID NO: 4180 - protein, 10 aa, Severe acute respiratory syndrome coronavirus 2
SQAWQPGVAM

SEQ ID NO: 4181 - protein, 10 aa, Severe acute respiratory syndrome coronavirus 2
WQPGVAMPNL

SEQ ID NO: 4182 - protein, 9 aa, Severe acute respiratory syndrome coronavirus 2
QPGVAMPNL

SEQ ID NO: 4183 - protein, 10 aa, Severe acute respiratory syndrome coronavirus 2
QPGVAMPNLY

SEQ ID NO: 4184 - protein, 9 aa, Severe acute respiratory syndrome coronavirus 2
GVAMPNLYK

SEQ ID NO: 4185 - protein, 9 aa, Severe acute respiratory syndrome coronavirus 2
VAMPNLYKM

SEQ ID NO: 4186 - protein, 10 aa, Severe acute respiratory syndrome coronavirus 2
AMPNLYKMQR

SEQ ID NO: 4187 - protein, 10 aa, Severe acute respiratory syndrome coronavirus 2
MPNLYKMQRM

SEQ ID NO: 4188 - protein, 9 aa, Severe acute respiratory syndrome coronavirus 2
NLYKMQRML

SEQ ID NO: 4189 - protein, 10 aa, Severe acute respiratory syndrome coronavirus 2
NLYKMQRMLL

SEQ ID NO: 4190 - protein, 9 aa, Severe acute respiratory syndrome coronavirus 2
LYKMQRMLL

SEQ ID NO: 4191 - protein, 10 aa, Severe acute respiratory syndrome coronavirus 2
LYKMQRMLLE

SEQ ID NO: 4192 - protein, 10 aa, Severe acute respiratory syndrome coronavirus 2
YKMQRMLLEK

SEQ ID NO: 4193 - protein, 9 aa, Severe acute respiratory syndrome coronavirus 2
KMQRMLLEK

SEQ ID NO: 4194 - protein, 10 aa, Severe acute respiratory syndrome coronavirus 2
LLEKCDLQNY

SEQ ID NO: 4195 - protein, 9 aa, Severe acute respiratory syndrome coronavirus 2
LEKCDLQNY

SEQ ID NO: 4196 - protein, 10 aa, Severe acute respiratory syndrome coronavirus 2
LQNYGDSATL

SEQ ID NO: 4197 - protein, 10 aa, Severe acute respiratory syndrome coronavirus 2
NYGDSATLPK

SEQ ID NO: 4198 - protein, 10 aa, Severe acute respiratory syndrome coronavirus 2
YGDSATLPKG

SEQ ID NO: 4199 - protein, 9 aa, Severe acute respiratory syndrome coronavirus 2
ATLPKGIMM

SEQ ID NO: 4200 - protein, 10 aa, Severe acute respiratory syndrome coronavirus 2
ATLPKGIMMN

SEQ ID NO: 4201 - protein, 10 aa, Severe acute respiratory syndrome coronavirus 2
TLPKGIMMNV

SEQ ID NO: 4202 - protein, 9 aa, Severe acute respiratory syndrome coronavirus 2
LPKGIMMNV

SEQ ID NO: 4203 - protein, 10 aa, Severe acute respiratory syndrome coronavirus 2
LPKGIMMNVA

SEQ ID NO: 4204 - protein, 9 aa, Severe acute respiratory syndrome coronavirus 2
KGIMMNVAK

SEQ ID NO: 4205 - protein, 9 aa, Severe acute respiratory syndrome coronavirus 2
GIMMNVAKY

SEQ ID NO: 4206 - protein, 9 aa, Severe acute respiratory syndrome coronavirus 2
IMMNVAKYT

SEQ ID NO: 4207 - protein, 10 aa, Severe acute respiratory syndrome coronavirus 2
IMMNVAKYTQ

SEQ ID NO: 4208 - protein, 10 aa, Severe acute respiratory syndrome coronavirus 2
MMNVAKYTQL

SEQ ID NO: 4209 - protein, 9 aa, Severe acute respiratory syndrome coronavirus 2
MNVAKYTQL

SEQ ID NO: 4210 - protein, 10 aa, Severe acute respiratory syndrome coronavirus 2
VAKYTQLCQY

SEQ ID NO: 4211 - protein, 10 aa, Severe acute respiratory syndrome coronavirus 2
AKYTQLCQYL

SEQ ID NO: 4212 - protein, 9 aa, Severe acute respiratory syndrome coronavirus 2
KYTQLCQYL

SEQ ID NO: 4213 - protein, 10 aa, Severe acute respiratory syndrome coronavirus 2
KYTQLCQYLN

SEQ ID NO: 4214 - protein, 10 aa, Severe acute respiratory syndrome coronavirus 2
YTQLCQYLNT

SEQ ID NO: 4215 - protein, 10 aa, Severe acute respiratory syndrome coronavirus 2
TQLCQYLNTL

SEQ ID NO: 4216 - protein, 9 aa, Severe acute respiratory syndrome coronavirus 2
QLCQYLNTL

SEQ ID NO: 4217 - protein, 10 aa, Severe acute respiratory syndrome coronavirus 2
QLCQYLNTLT

SEQ ID NO: 4218 - protein, 10 aa, Severe acute respiratory syndrome coronavirus 2
LCQYLNTLTL

SEQ ID NO: 4219 - protein, 10 aa, Severe acute respiratory syndrome coronavirus 2
CQYLNTLTLA

SEQ ID NO: 4220 - protein, 9 aa, Severe acute respiratory syndrome coronavirus 2
QYLNTLTLA

SEQ ID NO: 4221 - protein, 10 aa, Severe acute respiratory syndrome coronavirus 2
QYLNTLTLAV

SEQ ID NO: 4222 - protein, 9 aa, Severe acute respiratory syndrome coronavirus 2
YLNTLTLAV

SEQ ID NO: 4223 - protein, 10 aa, Severe acute respiratory syndrome coronavirus 2
YLNTLTLAVP

SEQ ID NO: 4224 - protein, 9 aa, Severe acute respiratory syndrome coronavirus 2
NTLTLAVPY

SEQ ID NO: 4225 - protein, 10 aa, Severe acute respiratory syndrome coronavirus 2
TLTLAVPYNM

SEQ ID NO: 4226 - protein, 10 aa, Severe acute respiratory syndrome coronavirus 2
LTLAVPYNMR

SEQ ID NO: 4227 - protein, 9 aa, Severe acute respiratory syndrome coronavirus 2
TLAVPYNMR

SEQ ID NO: 4228 - protein, 10 aa, Severe acute respiratory syndrome coronavirus 2
TLAVPYNMRV

SEQ ID NO: 4229 - protein, 9 aa, Severe acute respiratory syndrome coronavirus 2
VPYNMRVIH

SEQ ID NO: 4230 - protein, 10 aa, Severe acute respiratory syndrome coronavirus 2
VPYNMRVIHF

SEQ ID NO: 4231 - protein, 9 aa, Severe acute respiratory syndrome coronavirus 2
PYNMRVIHF

SEQ ID NO: 4232 - protein, 10 aa, Severe acute respiratory syndrome coronavirus 2
PYNMRVIHFG

SEQ ID NO: 4233 - protein, 10 aa, Severe acute respiratory syndrome coronavirus 2
YNMRVIHFGA

SEQ ID NO: 4234 - protein, 10 aa, Severe acute respiratory syndrome coronavirus 2
VIHFGAGSDK

SEQ ID NO: 4235 - protein, 9 aa, Severe acute respiratory syndrome coronavirus 2
IHFGAGSDK

SEQ ID NO: 4236 - protein, 9 aa, Severe acute respiratory syndrome coronavirus 2
GVAPGTAVL

SEQ ID NO: 4237 - protein, 10 aa, Severe acute respiratory syndrome coronavirus 2
GVAPGTAVLR

SEQ ID NO: 4238 - protein, 9 aa, Severe acute respiratory syndrome coronavirus 2
GTAVLRQWL

SEQ ID NO: 4239 - protein, 9 aa, Severe acute respiratory syndrome coronavirus 2
RQWLPTGTL

SEQ ID NO: 4240 - protein, 10 aa, Severe acute respiratory syndrome coronavirus 2
RQWLPTGTLL

SEQ ID NO: 4241 - protein, 9 aa, Severe acute respiratory syndrome coronavirus 2
QWLPTGTLL

SEQ ID NO: 4242 - protein, 10 aa, Severe acute respiratory syndrome coronavirus 2
QWLPTGTLLV

SEQ ID NO: 4243 - protein, 10 aa, Severe acute respiratory syndrome coronavirus 2
WLPTGTLLVD

SEQ ID NO: 4244 - protein, 9 aa, Severe acute respiratory syndrome coronavirus 2
LVDSDLNDF

SEQ ID NO: 4245 - protein, 10 aa, Severe acute respiratory syndrome coronavirus 2
LVDSDLNDFV

SEQ ID NO: 4246 - protein, 9 aa, Severe acute respiratory syndrome coronavirus 2
DSDLNDFVS

SEQ ID NO: 4247 - protein, 10 aa, Severe acute respiratory syndrome coronavirus 2
DSDLNDFVSD

SEQ ID NO: 4248 - protein, 10 aa, Severe acute respiratory syndrome coronavirus 2
DFVSDADSTL

SEQ ID NO: 4249 - protein, 9 aa, Severe acute respiratory syndrome coronavirus 2
FVSDADSTL

SEQ ID NO: 4250 - protein, 10 aa, Severe acute respiratory syndrome coronavirus 2
FVSDADSTLI

SEQ ID NO: 4251 - protein, 9 aa, Severe acute respiratory syndrome coronavirus 2
VSDADSTLI

SEQ ID NO: 4252 - protein, 10 aa, Severe acute respiratory syndrome coronavirus 2
VSDADSTLIG

SEQ ID NO: 4253 - protein, 10 aa, Severe acute respiratory syndrome coronavirus 2
STLIGDCATV

SEQ ID NO: 4254 - protein, 9 aa, Severe acute respiratory syndrome coronavirus 2
TLIGDCATV

SEQ ID NO: 4255 - protein, 9 aa, Severe acute respiratory syndrome coronavirus 2
CATVHTANK

SEQ ID NO: 4256 - protein, 10 aa, Severe acute respiratory syndrome coronavirus 2
CATVHTANKW

SEQ ID NO: 4257 - protein, 10 aa, Severe acute respiratory syndrome coronavirus 2
TVHTANKWDL

SEQ ID NO: 4258 - protein, 9 aa, Severe acute respiratory syndrome coronavirus 2
HTANKWDLI

SEQ ID NO: 4259 - protein, 9 aa, Severe acute respiratory syndrome coronavirus 2
TANKWDLII

SEQ ID NO: 4260 - protein, 10 aa, Severe acute respiratory syndrome coronavirus 2
KWDLIISDMY

SEQ ID NO: 4261 - protein, 9 aa, Severe acute respiratory syndrome coronavirus 2
WDLIISDMY

SEQ ID NO: 4262 - protein, 10 aa, Severe acute respiratory syndrome coronavirus 2
LIISDMYDPK

SEQ ID NO: 4263 - protein, 9 aa, Severe acute respiratory syndrome coronavirus 2
IISDMYDPK

SEQ ID NO: 4264 - protein, 9 aa, Severe acute respiratory syndrome coronavirus 2
ISDMYDPKT

SEQ ID NO: 4265 - protein, 10 aa, Severe acute respiratory syndrome coronavirus 2
ISDMYDPKTK

SEQ ID NO: 4266 - protein, 9 aa, Severe acute respiratory syndrome coronavirus 2
MYDPKTKNV

SEQ ID NO: 4267 - protein, 10 aa, Severe acute respiratory syndrome coronavirus 2
MYDPKTKNVT

SEQ ID NO: 4268 - protein, 10 aa, Severe acute respiratory syndrome coronavirus 2
TKENDSKEGF

SEQ ID NO: 4269 - protein, 9 aa, Severe acute respiratory syndrome coronavirus 2
KENDSKEGF

SEQ ID NO: 4270 - protein, 10 aa, Severe acute respiratory syndrome coronavirus 2
KENDSKEGFF

SEQ ID NO: 4271 - protein, 10 aa, Severe acute respiratory syndrome coronavirus 2
NDSKEGFFTY

SEQ ID NO: 4272 - protein, 9 aa, Severe acute respiratory syndrome coronavirus 2
DSKEGFFTY

SEQ ID NO: 4273 - protein, 10 aa, Severe acute respiratory syndrome coronavirus 2
DSKEGFFTYI

SEQ ID NO: 4274 - protein, 10 aa, Severe acute respiratory syndrome coronavirus 2
SKEGFFTYIC

SEQ ID NO: 4275 - protein, 9 aa, Severe acute respiratory syndrome coronavirus 2
KEGFFTYIC

SEQ ID NO: 4276 - protein, 10 aa, Severe acute respiratory syndrome coronavirus 2
KEGFFTYICG

SEQ ID NO: 4277 - protein, 10 aa, Severe acute respiratory syndrome coronavirus 2
EGFFTYICGF

SEQ ID NO: 4278 - protein, 9 aa, Severe acute respiratory syndrome coronavirus 2
GFFTYICGF

SEQ ID NO: 4279 - protein, 10 aa, Severe acute respiratory syndrome coronavirus 2
GFFTYICGFI

SEQ ID NO: 4280 - protein, 9 aa, Severe acute respiratory syndrome coronavirus 2
FFTYICGFI

SEQ ID NO: 4281 - protein, 9 aa, Severe acute respiratory syndrome coronavirus 2
FTYICGFIQ

SEQ ID NO: 4282 - protein, 9 aa, Severe acute respiratory syndrome coronavirus 2
TYICGFIQQ

SEQ ID NO: 4283 - protein, 10 aa, Severe acute respiratory syndrome coronavirus 2
TYICGFIQQK

SEQ ID NO: 4284 - protein, 9 aa, Severe acute respiratory syndrome coronavirus 2
YICGFIQQK

SEQ ID NO: 4285 - protein, 10 aa, Severe acute respiratory syndrome coronavirus 2
YICGFIQQKL

SEQ ID NO: 4286 - protein, 10 aa, Severe acute respiratory syndrome coronavirus 2
KLALGGSVAI

SEQ ID NO: 4287 - protein, 10 aa, Severe acute respiratory syndrome coronavirus 2
LALGGSVAIK

SEQ ID NO: 4288 - protein, 9 aa, Severe acute respiratory syndrome coronavirus 2
ALGGSVAIK

SEQ ID NO: 4289 - protein, 10 aa, Severe acute respiratory syndrome coronavirus 2
ALGGSVAIKI

SEQ ID NO: 4290 - protein, 9 aa, Severe acute respiratory syndrome coronavirus 2
SVAIKITEH

SEQ ID NO: 4291 - protein, 10 aa, Severe acute respiratory syndrome coronavirus 2
VAIKITEHSW

SEQ ID NO: 4292 - protein, 9 aa, Severe acute respiratory syndrome coronavirus 2
KITEHSWNA

SEQ ID NO: 4293 - protein, 9 aa, Severe acute respiratory syndrome coronavirus 2
ITEHSWNAD

SEQ ID NO: 4294 - protein, 10 aa, Severe acute respiratory syndrome coronavirus 2
ITEHSWNADL

SEQ ID NO: 4295 - protein, 9 aa, Severe acute respiratory syndrome coronavirus 2
TEHSWNADL

SEQ ID NO: 4296 - protein, 10 aa, Severe acute respiratory syndrome coronavirus 2
TEHSWNADLY

SEQ ID NO: 4297 - protein, 9 aa, Severe acute respiratory syndrome coronavirus 2
EHSWNADLY

SEQ ID NO: 4298 - protein, 9 aa, Severe acute respiratory syndrome coronavirus 2
HSWNADLYK

SEQ ID NO: 4299 - protein, 9 aa, Severe acute respiratory syndrome coronavirus 2
SWNADLYKL

SEQ ID NO: 4300 - protein, 10 aa, Severe acute respiratory syndrome coronavirus 2
SWNADLYKLM

SEQ ID NO: 4301 - protein, 9 aa, Severe acute respiratory syndrome coronavirus 2
NADLYKLMG

SEQ ID NO: 4302 - protein, 10 aa, Severe acute respiratory syndrome coronavirus 2
NADLYKLMGH

SEQ ID NO: 4303 - protein, 10 aa, Severe acute respiratory syndrome coronavirus 2
ADLYKLMGHF

SEQ ID NO: 4304 - protein, 9 aa, Severe acute respiratory syndrome coronavirus 2
DLYKLMGHF

SEQ ID NO: 4305 - protein, 10 aa, Severe acute respiratory syndrome coronavirus 2
DLYKLMGHFA

SEQ ID NO: 4306 - protein, 9 aa, Severe acute respiratory syndrome coronavirus 2
LYKLMGHFA

SEQ ID NO: 4307 - protein, 10 aa, Severe acute respiratory syndrome coronavirus 2
LYKLMGHFAW

SEQ ID NO: 4308 - protein, 9 aa, Severe acute respiratory syndrome coronavirus 2
YKLMGHFAW

SEQ ID NO: 4309 - protein, 10 aa, Severe acute respiratory syndrome coronavirus 2
YKLMGHFAWW

SEQ ID NO: 4310 - protein, 9 aa, Severe acute respiratory syndrome coronavirus 2
KLMGHFAWW

SEQ ID NO: 4311 - protein, 10 aa, Severe acute respiratory syndrome coronavirus 2
KLMGHFAWWT

SEQ ID NO: 4312 - protein, 9 aa, Severe acute respiratory syndrome coronavirus 2
LMGHFAWWT

SEQ ID NO: 4313 - protein, 10 aa, Severe acute respiratory syndrome coronavirus 2
LMGHFAWWTA

SEQ ID NO: 4314 - protein, 9 aa, Severe acute respiratory syndrome coronavirus 2
MGHFAWWTA

SEQ ID NO: 4315 - protein, 10 aa, Severe acute respiratory syndrome coronavirus 2
MGHFAWWTAF

SEQ ID NO: 4316 - protein, 9 aa, Severe acute respiratory syndrome coronavirus 2
GHFAWWTAF

SEQ ID NO: 4317 - protein, 10 aa, Severe acute respiratory syndrome coronavirus 2
GHFAWWTAFV

SEQ ID NO: 4318 - protein, 9 aa, Severe acute respiratory syndrome coronavirus 2
HFAWWTAFV

SEQ ID NO: 4319 - protein, 10 aa, Severe acute respiratory syndrome coronavirus 2
HFAWWTAFVT

SEQ ID NO: 4320 - protein, 10 aa, Severe acute respiratory syndrome coronavirus 2
AWWTAFVTNV

SEQ ID NO: 4321 - protein, 9 aa, Severe acute respiratory syndrome coronavirus 2
WWTAFVTNV

SEQ ID NO: 4322 - protein, 10 aa, Severe acute respiratory syndrome coronavirus 2
WWTAFVTNVN

SEQ ID NO: 4323 - protein, 9 aa, Severe acute respiratory syndrome coronavirus 2
WTAFVTNVN

SEQ ID NO: 4324 - protein, 9 aa, Severe acute respiratory syndrome coronavirus 2
ASSSEAFLI

SEQ ID NO: 4325 - protein, 10 aa, Severe acute respiratory syndrome coronavirus 2
SSEAFLIGCN

SEQ ID NO: 4326 - protein, 9 aa, Severe acute respiratory syndrome coronavirus 2
SEAFLIGCN

SEQ ID NO: 4327 - protein, 10 aa, Severe acute respiratory syndrome coronavirus 2
SEAFLIGCNY

SEQ ID NO: 4328 - protein, 9 aa, Severe acute respiratory syndrome coronavirus 2
EAFLIGCNY

SEQ ID NO: 4329 - protein, 9 aa, Severe acute respiratory syndrome coronavirus 2
AFLIGCNYL

SEQ ID NO: 4330 - protein, 10 aa, Severe acute respiratory syndrome coronavirus 2
AFLIGCNYLG

SEQ ID NO: 4331 - protein, 9 aa, Severe acute respiratory syndrome coronavirus 2
FLIGCNYLG

SEQ ID NO: 4332 - protein, 10 aa, Severe acute respiratory syndrome coronavirus 2
FLIGCNYLGK

SEQ ID NO: 4333 - protein, 9 aa, Severe acute respiratory syndrome coronavirus 2
LIGCNYLGK

SEQ ID NO: 4334 - protein, 9 aa, Severe acute respiratory syndrome coronavirus 2
NYLGKPREQ

SEQ ID NO: 4335 - protein, 10 aa, Severe acute respiratory syndrome coronavirus 2
NYLGKPREQI

SEQ ID NO: 4336 - protein, 10 aa, Severe acute respiratory syndrome coronavirus 2
KPREQIDGYV

SEQ ID NO: 4337 - protein, 9 aa, Severe acute respiratory syndrome coronavirus 2
REQIDGYVM

SEQ ID NO: 4338 - protein, 10 aa, Severe acute respiratory syndrome coronavirus 2
REQIDGYVMH

SEQ ID NO: 4339 - protein, 9 aa, Severe acute respiratory syndrome coronavirus 2
QIDGYVMHA

SEQ ID NO: 4340 - protein, 9 aa, Severe acute respiratory syndrome coronavirus 2
GYVMHANYI

SEQ ID NO: 4341 - protein, 10 aa, Severe acute respiratory syndrome coronavirus 2
GYVMHANYIF

SEQ ID NO: 4342 - protein, 9 aa, Severe acute respiratory syndrome coronavirus 2
YVMHANYIF

SEQ ID NO: 4343 - protein, 10 aa, Severe acute respiratory syndrome coronavirus 2
YVMHANYIFW

SEQ ID NO: 4344 - protein, 10 aa, Severe acute respiratory syndrome coronavirus 2
VMHANYIFWR

SEQ ID NO: 4345 - protein, 9 aa, Severe acute respiratory syndrome coronavirus 2
NYIFWRNTN

SEQ ID NO: 4346 - protein, 10 aa, Severe acute respiratory syndrome coronavirus 2
NYIFWRNTNP

SEQ ID NO: 4347 - protein, 10 aa, Severe acute respiratory syndrome coronavirus 2
YIFWRNTNPI

SEQ ID NO: 4348 - protein, 9 aa, Severe acute respiratory syndrome coronavirus 2
IFWRNTNPI

SEQ ID NO: 4349 - protein, 10 aa, Severe acute respiratory syndrome coronavirus 2
FWRNTNPIQL

SEQ ID NO: 4350 - protein, 9 aa, Severe acute respiratory syndrome coronavirus 2
NTNPIQLSS

SEQ ID NO: 4351 - protein, 10 aa, Severe acute respiratory syndrome coronavirus 2
NTNPIQLSSY

SEQ ID NO: 4352 - protein, 10 aa, Severe acute respiratory syndrome coronavirus 2
NPIQLSSYSL

SEQ ID NO: 4353 - protein, 10 aa, Severe acute respiratory syndrome coronavirus 2
QLSSYSLFDM

SEQ ID NO: 4354 - protein, 9 aa, Severe acute respiratory syndrome coronavirus 2
LSSYSLFDM

SEQ ID NO: 4355 - protein, 10 aa, Severe acute respiratory syndrome coronavirus 2
LSSYSLFDMS

SEQ ID NO: 4356 - protein, 10 aa, Severe acute respiratory syndrome coronavirus 2
SSYSLFDMSK

SEQ ID NO: 4357 - protein, 9 aa, Severe acute respiratory syndrome coronavirus 2
SYSLFDMSK

SEQ ID NO: 4358 - protein, 10 aa, Severe acute respiratory syndrome coronavirus 2
SYSLFDMSKF

SEQ ID NO: 4359 - protein, 9 aa, Severe acute respiratory syndrome coronavirus 2
YSLFDMSKF

SEQ ID NO: 4360 - protein, 9 aa, Severe acute respiratory syndrome coronavirus 2
SLFDMSKFP

SEQ ID NO: 4361 - protein, 10 aa, Severe acute respiratory syndrome coronavirus 2
SLFDMSKFPL

SEQ ID NO: 4362 - protein, 10 aa, Severe acute respiratory syndrome coronavirus 2
LFDMSKFPLK

SEQ ID NO: 4363 - protein, 9 aa, Severe acute respiratory syndrome coronavirus 2
FDMSKFPLK

SEQ ID NO: 4364 - protein, 10 aa, Severe acute respiratory syndrome coronavirus 2
FDMSKFPLKL

SEQ ID NO: 4365 - protein, 9 aa, Severe acute respiratory syndrome coronavirus 2
DMSKFPLKL

SEQ ID NO: 4366 - protein, 9 aa, Severe acute respiratory syndrome coronavirus 2
MSKFPLKLR

SEQ ID NO: 4367 - protein, 9 aa, Severe acute respiratory syndrome coronavirus 2
FPLKLRGTA

SEQ ID NO: 4368 - protein, 10 aa, Severe acute respiratory syndrome coronavirus 2
FPLKLRGTAV

SEQ ID NO: 4369 - protein, 10 aa, Severe acute respiratory syndrome coronavirus 2
KLRGTAVMSL

SEQ ID NO: 4370 - protein, 10 aa, Severe acute respiratory syndrome coronavirus 2
LRGTAVMSLK

SEQ ID NO: 4371 - protein, 9 aa, Severe acute respiratory syndrome coronavirus 2
RGTAVMSLK

SEQ ID NO: 4372 - protein, 9 aa, Severe acute respiratory syndrome coronavirus 2
GTAVMSLKE

SEQ ID NO: 4373 - protein, 10 aa, Severe acute respiratory syndrome coronavirus 2
AVMSLKEGQI

SEQ ID NO: 4374 - protein, 9 aa, Severe acute respiratory syndrome coronavirus 2
KEGQINDMI

SEQ ID NO: 4375 - protein, 10 aa, Severe acute respiratory syndrome coronavirus 2
KEGQINDMIL

SEQ ID NO: 4376 - protein, 10 aa, Severe acute respiratory syndrome coronavirus 2
GQINDMILSL

SEQ ID NO: 4377 - protein, 9 aa, Severe acute respiratory syndrome coronavirus 2
QINDMILSL

SEQ ID NO: 4378 - protein, 10 aa, Severe acute respiratory syndrome coronavirus 2
QINDMILSLL

SEQ ID NO: 4379 - protein, 10 aa, Severe acute respiratory syndrome coronavirus 2
NDMILSLLSK

SEQ ID NO: 4380 - protein, 10 aa, Severe acute respiratory syndrome coronavirus 2
MILSLLSKGR

SEQ ID NO: 4381 - protein, 10 aa, Severe acute respiratory syndrome coronavirus 2
ILSLLSKGRL

SEQ ID NO: 4382 - protein, 9 aa, Severe acute respiratory syndrome coronavirus 2
SLLSKGRLI

SEQ ID NO: 4383 - protein, 10 aa, Severe acute respiratory syndrome coronavirus 2
SLLSKGRLII

SEQ ID NO: 4384 - protein, 10 aa, Severe acute respiratory syndrome coronavirus 2
LLSKGRLIIR

SEQ ID NO: 4385 - protein, 9 aa, Severe acute respiratory syndrome coronavirus 2
RLIIRENNR

SEQ ID NO: 4386 - protein, 9 aa, Severe acute respiratory syndrome coronavirus 2
LIIRENNRV

SEQ ID NO: 4387 - protein, 9 aa, Severe acute respiratory syndrome coronavirus 2
IIRENNRVV

SEQ ID NO: 4388 - protein, 9 aa, Severe acute respiratory syndrome coronavirus 2
RENNRVVIS

SEQ ID NO: 4389 - protein, 9 aa, Severe acute respiratory syndrome coronavirus 2
RVVISSDVL

SEQ ID NO: 4390 - protein, 10 aa, Severe acute respiratory syndrome coronavirus 2
ATEVPANSTV

SEQ ID NO: 4391 - protein, 9 aa, Severe acute respiratory syndrome coronavirus 2
TEVPANSTV

SEQ ID NO: 4392 - protein, 10 aa, Severe acute respiratory syndrome coronavirus 2
TEVPANSTVL

SEQ ID NO: 4393 - protein, 10 aa, Severe acute respiratory syndrome coronavirus 2
VPANSTVLSF

SEQ ID NO: 4394 - protein, 9 aa, Severe acute respiratory syndrome coronavirus 2
NSTVLSFCA

SEQ ID NO: 4395 - protein, 10 aa, Severe acute respiratory syndrome coronavirus 2
NSTVLSFCAF

SEQ ID NO: 4396 - protein, 9 aa, Severe acute respiratory syndrome coronavirus 2
STVLSFCAF

SEQ ID NO: 4397 - protein, 10 aa, Severe acute respiratory syndrome coronavirus 2
STVLSFCAFA

SEQ ID NO: 4398 - protein, 9 aa, Severe acute respiratory syndrome coronavirus 2
TVLSFCAFA

SEQ ID NO: 4399 - protein, 10 aa, Severe acute respiratory syndrome coronavirus 2
TVLSFCAFAV

SEQ ID NO: 4400 - protein, 9 aa, Severe acute respiratory syndrome coronavirus 2
VLSFCAFAV

SEQ ID NO: 4401 - protein, 9 aa, Severe acute respiratory syndrome coronavirus 2
CAFAVDAAK

SEQ ID NO: 4402 - protein, 10 aa, Severe acute respiratory syndrome coronavirus 2
FAVDAAKAYK

SEQ ID NO: 4403 - protein, 9 aa, Severe acute respiratory syndrome coronavirus 2
AVDAAKAYK

SEQ ID NO: 4404 - protein, 10 aa, Severe acute respiratory syndrome coronavirus 2
AVDAAKAYKD

SEQ ID NO: 4405 - protein, 9 aa, Severe acute respiratory syndrome coronavirus 2
DAAKAYKDY

SEQ ID NO: 4406 - protein, 10 aa, Severe acute respiratory syndrome coronavirus 2
DYLASGGQPI

SEQ ID NO: 4407 - protein, 10 aa, Severe acute respiratory syndrome coronavirus 2
YLASGGQPIT

SEQ ID NO: 4408 - protein, 9 aa, Severe acute respiratory syndrome coronavirus 2
QPITNCVKM

SEQ ID NO: 4409 - protein, 10 aa, Severe acute respiratory syndrome coronavirus 2
QPITNCVKML

SEQ ID NO: 4410 - protein, 9 aa, Severe acute respiratory syndrome coronavirus 2
ITNCVKMLC

SEQ ID NO: 4411 - protein, 10 aa, Severe acute respiratory syndrome coronavirus 2
ITNCVKMLCT

SEQ ID NO: 4412 - protein, 9 aa, Severe acute respiratory syndrome coronavirus 2
KMLCTHTGT

SEQ ID NO: 4413 - protein, 10 aa, Severe acute respiratory syndrome coronavirus 2
MLCTHTGTGQ

SEQ ID NO: 4414 - protein, 9 aa, Severe acute respiratory syndrome coronavirus 2
NMDQESFGG

SEQ ID NO: 4415 - protein, 10 aa, Severe acute respiratory syndrome coronavirus 2
NMDQESFGGA

SEQ ID NO: 4416 - protein, 9 aa, Severe acute respiratory syndrome coronavirus 2
QESFGGASC

SEQ ID NO: 4417 - protein, 9 aa, Severe acute respiratory syndrome coronavirus 2
SFGGASCCL

SEQ ID NO: 4418 - protein, 9 aa, Severe acute respiratory syndrome coronavirus 2
FGGASCCLY

SEQ ID NO: 4419 - protein, 10 aa, Severe acute respiratory syndrome coronavirus 2
SCCLYCRCHI

SEQ ID NO: 4420 - protein, 9 aa, Severe acute respiratory syndrome coronavirus 2
CCLYCRCHI

SEQ ID NO: 4421 - protein, 9 aa, Severe acute respiratory syndrome coronavirus 2
CHIDHPNPK

SEQ ID NO: 4422 - protein, 10 aa, Severe acute respiratory syndrome coronavirus 2
HIDHPNPKGF

SEQ ID NO: 4423 - protein, 9 aa, Severe acute respiratory syndrome coronavirus 2
IDHPNPKGF

SEQ ID NO: 4424 - protein, 9 aa, Severe acute respiratory syndrome coronavirus 2
HPNPKGFCD

SEQ ID NO: 4425 - protein, 10 aa, Severe acute respiratory syndrome coronavirus 2
HPNPKGFCDL

SEQ ID NO: 4426 - protein, 9 aa, Severe acute respiratory syndrome coronavirus 2
KGFCDLKGK

SEQ ID NO: 4427 - protein, 9 aa, Severe acute respiratory syndrome coronavirus 2
FCDLKGKYV

SEQ ID NO: 4428 - protein, 9 aa, Severe acute respiratory syndrome coronavirus 2
KYVQIPTTC

SEQ ID NO: 4429 - protein, 9 aa, Severe acute respiratory syndrome coronavirus 2
YVQIPTTCA

SEQ ID NO: 4430 - protein, 9 aa, Severe acute respiratory syndrome coronavirus 2
IPTTCANDP

SEQ ID NO: 4431 - protein, 10 aa, Severe acute respiratory syndrome coronavirus 2
IPTTCANDPV

SEQ ID NO: 4432 - protein, 10 aa, Severe acute respiratory syndrome coronavirus 2
TTCANDPVGF

SEQ ID NO: 4433 - protein, 10 aa, Severe acute respiratory syndrome coronavirus 2
CANDPVGFTL

SEQ ID NO: 4434 - protein, 10 aa, Severe acute respiratory syndrome coronavirus 2
ANDPVGFTLK

SEQ ID NO: 4435 - protein, 9 aa, Severe acute respiratory syndrome coronavirus 2
FTLKNTVCT

SEQ ID NO: 4436 - protein, 10 aa, Severe acute respiratory syndrome coronavirus 2
FTLKNTVCTV

SEQ ID NO: 4437 - protein, 9 aa, Severe acute respiratory syndrome coronavirus 2
TLKNTVCTV

SEQ ID NO: 4438 - protein, 10 aa, Severe acute respiratory syndrome coronavirus 2
KNTVCTVCGM

SEQ ID NO: 4439 - protein, 10 aa, Severe acute respiratory syndrome coronavirus 2
NTVCTVCGMW

SEQ ID NO: 4440 - protein, 10 aa, Severe acute respiratory syndrome coronavirus 2
TVCTVCGMWK

SEQ ID NO: 4441 - protein, 9 aa, Severe acute respiratory syndrome coronavirus 2
VCTVCGMWK

SEQ ID NO: 4442 - protein, 10 aa, Severe acute respiratory syndrome coronavirus 2
CTVCGMWKGY

SEQ ID NO: 4443 - protein, 9 aa, Severe acute respiratory syndrome coronavirus 2
TVCGMWKGY

SEQ ID NO: 4444 - protein, 10 aa, Severe acute respiratory syndrome coronavirus 2
MWKGYGCSCD

SEQ ID NO: 4445 - protein, 9 aa, Severe acute respiratory syndrome coronavirus 2
GYGCSCDQL

SEQ ID NO: 4446 - protein, 9 aa, Severe acute respiratory syndrome coronavirus 2
CSCDQLREP

SEQ ID NO: 4447 - protein, 9 aa, Severe acute respiratory syndrome coronavirus 2
YTRYLIGGV

SEQ ID NO: 4448 - protein, 9 aa, Severe acute respiratory syndrome coronavirus 2
YLIGGVDNN

SEQ ID NO: 4449 - protein, 10 aa, Severe acute respiratory syndrome coronavirus 2
YLIGGVDNNF

SEQ ID NO: 4450 - protein, 9 aa, Severe acute respiratory syndrome coronavirus 2
GVDNNFCGP

SEQ ID NO: 4451 - protein, 10 aa, Severe acute respiratory syndrome coronavirus 2
VDNNFCGPDG

SEQ ID NO: 4452 - protein, 9 aa, Severe acute respiratory syndrome coronavirus 2
NNFCGPDGY

SEQ ID NO: 4453 - protein, 10 aa, Severe acute respiratory syndrome coronavirus 2
NFCGPDGYPL

SEQ ID NO: 4454 - protein, 9 aa, Severe acute respiratory syndrome coronavirus 2
YPLECIKDL

SEQ ID NO: 4455 - protein, 10 aa, Severe acute respiratory syndrome coronavirus 2
YPLECIKDLL

SEQ ID NO: 4456 - protein, 10 aa, Severe acute respiratory syndrome coronavirus 2
LECIKDLLAR

SEQ ID NO: 4457 - protein, 9 aa, Severe acute respiratory syndrome coronavirus 2
LARAGKASC

SEQ ID NO: 4458 - protein, 9 aa, Severe acute respiratory syndrome coronavirus 2
RAGKASCTL

SEQ ID NO: 4459 - protein, 9 aa, Severe acute respiratory syndrome coronavirus 2
CTLSEQLDF

SEQ ID NO: 4460 - protein, 9 aa, Severe acute respiratory syndrome coronavirus 2
TLSEQLDFI

SEQ ID NO: 4461 - protein, 9 aa, Severe acute respiratory syndrome coronavirus 2
LSEQLDFID

SEQ ID NO: 4462 - protein, 10 aa, Severe acute respiratory syndrome coronavirus 2
LSEQLDFIDT

SEQ ID NO: 4463 - protein, 10 aa, Severe acute respiratory syndrome coronavirus 2
QLDFIDTKRG

SEQ ID NO: 4464 - protein, 9 aa, Severe acute respiratory syndrome coronavirus 2
FIDTKRGVY

SEQ ID NO: 4465 - protein, 10 aa, Severe acute respiratory syndrome coronavirus 2
FIDTKRGVYC

SEQ ID NO: 4466 - protein, 10 aa, Severe acute respiratory syndrome coronavirus 2
VYCCREHEHE

SEQ ID NO: 4467 - protein, 9 aa, Severe acute respiratory syndrome coronavirus 2
REHEHEIAW

SEQ ID NO: 4468 - protein, 10 aa, Severe acute respiratory syndrome coronavirus 2
REHEHEIAWY

SEQ ID NO: 4469 - protein, 9 aa, Severe acute respiratory syndrome coronavirus 2
EHEHEIAWY

SEQ ID NO: 4470 - protein, 9 aa, Severe acute respiratory syndrome coronavirus 2
HEHEIAWYT

SEQ ID NO: 4471 - protein, 10 aa, Severe acute respiratory syndrome coronavirus 2
HEHEIAWYTE

SEQ ID NO: 4472 - protein, 9 aa, Severe acute respiratory syndrome coronavirus 2
HEIAWYTER

SEQ ID NO: 4473 - protein, 10 aa, Severe acute respiratory syndrome coronavirus 2
HEIAWYTERS

SEQ ID NO: 4474 - protein, 9 aa, Severe acute respiratory syndrome coronavirus 2
AWYTERSEK

SEQ ID NO: 4475 - protein, 9 aa, Severe acute respiratory syndrome coronavirus 2
YTERSEKSY

SEQ ID NO: 4476 - protein, 10 aa, Severe acute respiratory syndrome coronavirus 2
YTERSEKSYE

SEQ ID NO: 4477 - protein, 10 aa, Severe acute respiratory syndrome coronavirus 2
TERSEKSYEL

SEQ ID NO: 4478 - protein, 10 aa, Severe acute respiratory syndrome coronavirus 2
RSEKSYELQT

SEQ ID NO: 4479 - protein, 9 aa, Severe acute respiratory syndrome coronavirus 2
SEKSYELQT

SEQ ID NO: 4480 - protein, 9 aa, Severe acute respiratory syndrome coronavirus 2
KSYELQTPF

SEQ ID NO: 4481 - protein, 10 aa, Severe acute respiratory syndrome coronavirus 2
SYELQTPFEI

SEQ ID NO: 4482 - protein, 9 aa, Severe acute respiratory syndrome coronavirus 2
YELQTPFEI

SEQ ID NO: 4483 - protein, 10 aa, Severe acute respiratory syndrome coronavirus 2
QTPFEIKLAK

SEQ ID NO: 4484 - protein, 10 aa, Severe acute respiratory syndrome coronavirus 2
TPFEIKLAKK

SEQ ID NO: 4485 - protein, 9 aa, Severe acute respiratory syndrome coronavirus 2
KLAKKFDTF

SEQ ID NO: 4486 - protein, 10 aa, Severe acute respiratory syndrome coronavirus 2
KLAKKFDTFN

SEQ ID NO: 4487 - protein, 9 aa, Severe acute respiratory syndrome coronavirus 2
TFNGECPNF

SEQ ID NO: 4488 - protein, 9 aa, Severe acute respiratory syndrome coronavirus 2
FNGECPNFV

SEQ ID NO: 4489 - protein, 10 aa, Severe acute respiratory syndrome coronavirus 2
FNGECPNFVF

SEQ ID NO: 4490 - protein, 10 aa, Severe acute respiratory syndrome coronavirus 2
GECPNFVFPL

SEQ ID NO: 4491 - protein, 9 aa, Severe acute respiratory syndrome coronavirus 2
ECPNFVFPL

SEQ ID NO: 4492 - protein, 9 aa, Severe acute respiratory syndrome coronavirus 2
NFVFPLNSI

SEQ ID NO: 4493 - protein, 10 aa, Severe acute respiratory syndrome coronavirus 2
NFVFPLNSII

SEQ ID NO: 4494 - protein, 9 aa, Severe acute respiratory syndrome coronavirus 2
FVFPLNSII

SEQ ID NO: 4495 - protein, 10 aa, Severe acute respiratory syndrome coronavirus 2
FVFPLNSIIK

SEQ ID NO: 4496 - protein, 10 aa, Severe acute respiratory syndrome coronavirus 2
FPLNSIIKTI

SEQ ID NO: 4497 - protein, 9 aa, Severe acute respiratory syndrome coronavirus 2
PLNSIIKTI

SEQ ID NO: 4498 - protein, 9 aa, Severe acute respiratory syndrome coronavirus 2
SIIKTIQPR

SEQ ID NO: 4499 - protein, 9 aa, Severe acute respiratory syndrome coronavirus 2
IIKTIQPRV

SEQ ID NO: 4500 - protein, 9 aa, Severe acute respiratory syndrome coronavirus 2
KTIQPRVEK

SEQ ID NO: 4501 - protein, 10 aa, Severe acute respiratory syndrome coronavirus 2
KTIQPRVEKK

SEQ ID NO: 4502 - protein, 9 aa, Severe acute respiratory syndrome coronavirus 2
TIQPRVEKK

SEQ ID NO: 4503 - protein, 10 aa, Severe acute respiratory syndrome coronavirus 2
TIQPRVEKKK

SEQ ID NO: 4504 - protein, 9 aa, Severe acute respiratory syndrome coronavirus 2
QPRVEKKKL

SEQ ID NO: 4505 - protein, 10 aa, Severe acute respiratory syndrome coronavirus 2
RVEKKKLDGF

SEQ ID NO: 4506 - protein, 9 aa, Severe acute respiratory syndrome coronavirus 2
VEKKKLDGF

SEQ ID NO: 4507 - protein, 9 aa, Severe acute respiratory syndrome coronavirus 2
KKLDGFMGR

SEQ ID NO: 4508 - protein, 9 aa, Severe acute respiratory syndrome coronavirus 2
KLDGFMGRI

SEQ ID NO: 4509 - protein, 10 aa, Severe acute respiratory syndrome coronavirus 2
KLDGFMGRIR

SEQ ID NO: 4510 - protein, 10 aa, Severe acute respiratory syndrome coronavirus 2
GFMGRIRSVY

SEQ ID NO: 4511 - protein, 9 aa, Severe acute respiratory syndrome coronavirus 2
FMGRIRSVY

SEQ ID NO: 4512 - protein, 9 aa, Severe acute respiratory syndrome coronavirus 2
SVYPVASPN

SEQ ID NO: 4513 - protein, 9 aa, Severe acute respiratory syndrome coronavirus 2
VYPVASPNE

SEQ ID NO: 4514 - protein, 10 aa, Severe acute respiratory syndrome coronavirus 2
VYPVASPNEC

SEQ ID NO: 4515 - protein, 9 aa, Severe acute respiratory syndrome coronavirus 2
YPVASPNEC

SEQ ID NO: 4516 - protein, 9 aa, Severe acute respiratory syndrome coronavirus 2
SPNECNQMC

SEQ ID NO: 4517 - protein, 10 aa, Severe acute respiratory syndrome coronavirus 2
SPNECNQMCL

SEQ ID NO: 4518 - protein, 10 aa, Severe acute respiratory syndrome coronavirus 2
NECNQMCLST

SEQ ID NO: 4519 - protein, 9 aa, Severe acute respiratory syndrome coronavirus 2
ECNQMCLST

SEQ ID NO: 4520 - protein, 10 aa, Severe acute respiratory syndrome coronavirus 2
ECNQMCLSTL

SEQ ID NO: 4521 - protein, 10 aa, Severe acute respiratory syndrome coronavirus 2
CNQMCLSTLM

SEQ ID NO: 4522 - protein, 9 aa, Severe acute respiratory syndrome coronavirus 2
NQMCLSTLM

SEQ ID NO: 4523 - protein, 10 aa, Severe acute respiratory syndrome coronavirus 2
NQMCLSTLMK

SEQ ID NO: 4524 - protein, 9 aa, Severe acute respiratory syndrome coronavirus 2
QMCLSTLMK

SEQ ID NO: 4525 - protein, 9 aa, Severe acute respiratory syndrome coronavirus 2
LSTLMKCDH

SEQ ID NO: 4526 - protein, 10 aa, Severe acute respiratory syndrome coronavirus 2
TLMKCDHCGE

SEQ ID NO: 4527 - protein, 9 aa, Severe acute respiratory syndrome coronavirus 2
CDHCGETSW

SEQ ID NO: 4528 - protein, 9 aa, Severe acute respiratory syndrome coronavirus 2
GETSWQTGD

SEQ ID NO: 4529 - protein, 10 aa, Severe acute respiratory syndrome coronavirus 2
GETSWQTGDF

SEQ ID NO: 4530 - protein, 9 aa, Severe acute respiratory syndrome coronavirus 2
ETSWQTGDF

SEQ ID NO: 4531 - protein, 10 aa, Severe acute respiratory syndrome coronavirus 2
ETSWQTGDFV

SEQ ID NO: 4532 - protein, 9 aa, Severe acute respiratory syndrome coronavirus 2
TSWQTGDFV

SEQ ID NO: 4533 - protein, 10 aa, Severe acute respiratory syndrome coronavirus 2
TSWQTGDFVK

SEQ ID NO: 4534 - protein, 10 aa, Severe acute respiratory syndrome coronavirus 2
SWQTGDFVKA

SEQ ID NO: 4535 - protein, 10 aa, Severe acute respiratory syndrome coronavirus 2
GDFVKATCEF

SEQ ID NO: 4536 - protein, 9 aa, Severe acute respiratory syndrome coronavirus 2
DFVKATCEF

SEQ ID NO: 4537 - protein, 10 aa, Severe acute respiratory syndrome coronavirus 2
ATCEFCGTEN

SEQ ID NO: 4538 - protein, 9 aa, Severe acute respiratory syndrome coronavirus 2
CEFCGTENL

SEQ ID NO: 4539 - protein, 9 aa, Severe acute respiratory syndrome coronavirus 2
FCGTENLTK

SEQ ID NO: 4540 - protein, 9 aa, Severe acute respiratory syndrome coronavirus 2
GTENLTKEG

SEQ ID NO: 4541 - protein, 10 aa, Severe acute respiratory syndrome coronavirus 2
GTENLTKEGA

SEQ ID NO: 4542 - protein, 9 aa, Severe acute respiratory syndrome coronavirus 2
TENLTKEGA

SEQ ID NO: 4543 - protein, 10 aa, Severe acute respiratory syndrome coronavirus 2
TENLTKEGAT

SEQ ID NO: 4544 - protein, 10 aa, Severe acute respiratory syndrome coronavirus 2
TKEGATTCGY

SEQ ID NO: 4545 - protein, 9 aa, Severe acute respiratory syndrome coronavirus 2
KEGATTCGY

SEQ ID NO: 4546 - protein, 10 aa, Severe acute respiratory syndrome coronavirus 2
KEGATTCGYL

SEQ ID NO: 4547 - protein, 9 aa, Severe acute respiratory syndrome coronavirus 2
LPQNAVVKI

SEQ ID NO: 4548 - protein, 10 aa, Severe acute respiratory syndrome coronavirus 2
LPQNAVVKIY

SEQ ID NO: 4549 - protein, 9 aa, Severe acute respiratory syndrome coronavirus 2
IYCPACHNS

SEQ ID NO: 4550 - protein, 10 aa, Severe acute respiratory syndrome coronavirus 2
IYCPACHNSE

SEQ ID NO: 4551 - protein, 9 aa, Severe acute respiratory syndrome coronavirus 2
CPACHNSEV

SEQ ID NO: 4552 - protein, 10 aa, Severe acute respiratory syndrome coronavirus 2
CPACHNSEVG

SEQ ID NO: 4553 - protein, 10 aa, Severe acute respiratory syndrome coronavirus 2
NSEVGPEHSL

SEQ ID NO: 4554 - protein, 9 aa, Severe acute respiratory syndrome coronavirus 2
SEVGPEHSL

SEQ ID NO: 4555 - protein, 10 aa, Severe acute respiratory syndrome coronavirus 2
SEVGPEHSLA

SEQ ID NO: 4556 - protein, 9 aa, Severe acute respiratory syndrome coronavirus 2
GPEHSLAEY

SEQ ID NO: 4557 - protein, 9 aa, Severe acute respiratory syndrome coronavirus 2
PEHSLAEYH

SEQ ID NO: 4558 - protein, 9 aa, Severe acute respiratory syndrome coronavirus 2
AEYHNESGL

SEQ ID NO: 4559 - protein, 10 aa, Severe acute respiratory syndrome coronavirus 2
AEYHNESGLK

SEQ ID NO: 4560 - protein, 9 aa, Severe acute respiratory syndrome coronavirus 2
NESGLKTIL

SEQ ID NO: 4561 - protein, 10 aa, Severe acute respiratory syndrome coronavirus 2
NESGLKTILR

SEQ ID NO: 4562 - protein, 10 aa, Severe acute respiratory syndrome coronavirus 2
ESGLKTILRK

SEQ ID NO: 4563 - protein, 9 aa, Severe acute respiratory syndrome coronavirus 2
SGLKTILRK

SEQ ID NO: 4564 - protein, 9 aa, Severe acute respiratory syndrome coronavirus 2
KTILRKGGR

SEQ ID NO: 4565 - protein, 9 aa, Severe acute respiratory syndrome coronavirus 2
ILRKGGRTI

SEQ ID NO: 4566 - protein, 9 aa, Severe acute respiratory syndrome coronavirus 2
RTIAFGGCV

SEQ ID NO: 4567 - protein, 10 aa, Severe acute respiratory syndrome coronavirus 2
RTIAFGGCVF

SEQ ID NO: 4568 - protein, 10 aa, Severe acute respiratory syndrome coronavirus 2
IAFGGCVFSY

SEQ ID NO: 4569 - protein, 9 aa, Severe acute respiratory syndrome coronavirus 2
AFGGCVFSY

SEQ ID NO: 4570 - protein, 10 aa, Severe acute respiratory syndrome coronavirus 2
AFGGCVFSYV

SEQ ID NO: 4571 - protein, 9 aa, Severe acute respiratory syndrome coronavirus 2
FGGCVFSYV

SEQ ID NO: 4572 - protein, 9 aa, Severe acute respiratory syndrome coronavirus 2
CVFSYVGCH

SEQ ID NO: 4573 - protein, 10 aa, Severe acute respiratory syndrome coronavirus 2
CVFSYVGCHN

SEQ ID NO: 4574 - protein, 10 aa, Severe acute respiratory syndrome coronavirus 2
VFSYVGCHNK

SEQ ID NO: 4575 - protein, 9 aa, Severe acute respiratory syndrome coronavirus 2
FSYVGCHNK

SEQ ID NO: 4576 - protein, 9 aa, Severe acute respiratory syndrome coronavirus 2
SYVGCHNKC

SEQ ID NO: 4577 - protein, 9 aa, Severe acute respiratory syndrome coronavirus 2
YVGCHNKCA

SEQ ID NO: 4578 - protein, 10 aa, Severe acute respiratory syndrome coronavirus 2
YVGCHNKCAY

SEQ ID NO: 4579 - protein, 9 aa, Severe acute respiratory syndrome coronavirus 2
VGCHNKCAY

SEQ ID NO: 4580 - protein, 10 aa, Severe acute respiratory syndrome coronavirus 2
VGCHNKCAYW

SEQ ID NO: 4581 - protein, 10 aa, Severe acute respiratory syndrome coronavirus 2
CAYWVPRASA

SEQ ID NO: 4582 - protein, 10 aa, Severe acute respiratory syndrome coronavirus 2
YWVPRASANI

SEQ ID NO: 4583 - protein, 9 aa, Severe acute respiratory syndrome coronavirus 2
ASANIGCNH

SEQ ID NO: 4584 - protein, 10 aa, Severe acute respiratory syndrome coronavirus 2
ANIGCNHTGV

SEQ ID NO: 4585 - protein, 9 aa, Severe acute respiratory syndrome coronavirus 2
GSEGLNDNL

SEQ ID NO: 4586 - protein, 9 aa, Severe acute respiratory syndrome coronavirus 2
SEGLNDNLL

SEQ ID NO: 4587 - protein, 10 aa, Severe acute respiratory syndrome coronavirus 2
SEGLNDNLLE

SEQ ID NO: 4588 - protein, 10 aa, Severe acute respiratory syndrome coronavirus 2
GLNDNLLEIL

SEQ ID NO: 4589 - protein, 10 aa, Severe acute respiratory syndrome coronavirus 2
LLEILQKEKV

SEQ ID NO: 4590 - protein, 9 aa, Severe acute respiratory syndrome coronavirus 2
KEKVNINIV

SEQ ID NO: 4591 - protein, 10 aa, Severe acute respiratory syndrome coronavirus 2
VNINIVGDFK

SEQ ID NO: 4592 - protein, 9 aa, Severe acute respiratory syndrome coronavirus 2
KLNEEIAII

SEQ ID NO: 4593 - protein, 10 aa, Severe acute respiratory syndrome coronavirus 2
KLNEEIAIIL

SEQ ID NO: 4594 - protein, 9 aa, Severe acute respiratory syndrome coronavirus 2
NEEIAIILA

SEQ ID NO: 4595 - protein, 9 aa, Severe acute respiratory syndrome coronavirus 2
EEIAIILAS

SEQ ID NO: 4596 - protein, 10 aa, Severe acute respiratory syndrome coronavirus 2
EEIAIILASF

SEQ ID NO: 4597 - protein, 9 aa, Severe acute respiratory syndrome coronavirus 2
AIILASFSA

SEQ ID NO: 4598 - protein, 10 aa, Severe acute respiratory syndrome coronavirus 2
IILASFSAST

SEQ ID NO: 4599 - protein, 10 aa, Severe acute respiratory syndrome coronavirus 2
ASFSASTSAF

SEQ ID NO: 4600 - protein, 9 aa, Severe acute respiratory syndrome coronavirus 2
SFSASTSAF

SEQ ID NO: 4601 - protein, 10 aa, Severe acute respiratory syndrome coronavirus 2
SFSASTSAFV

SEQ ID NO: 4602 - protein, 9 aa, Severe acute respiratory syndrome coronavirus 2
FSASTSAFV

SEQ ID NO: 4603 - protein, 9 aa, Severe acute respiratory syndrome coronavirus 2
STSAFVETV

SEQ ID NO: 4604 - protein, 10 aa, Severe acute respiratory syndrome coronavirus 2
STSAFVETVK

SEQ ID NO: 4605 - protein, 9 aa, Severe acute respiratory syndrome coronavirus 2
TSAFVETVK

SEQ ID NO: 4606 - protein, 9 aa, Severe acute respiratory syndrome coronavirus 2
AFVETVKGL

SEQ ID NO: 4607 - protein, 10 aa, Severe acute respiratory syndrome coronavirus 2
FVETVKGLDY

SEQ ID NO: 4608 - protein, 9 aa, Severe acute respiratory syndrome coronavirus 2
VETVKGLDY

SEQ ID NO: 4609 - protein, 9 aa, Severe acute respiratory syndrome coronavirus 2
KGLDYKAFK

SEQ ID NO: 4610 - protein, 10 aa, Severe acute respiratory syndrome coronavirus 2
KQIVESCGNF

SEQ ID NO: 4611 - protein, 10 aa, Severe acute respiratory syndrome coronavirus 2
QIVESCGNFK

SEQ ID NO: 4612 - protein, 9 aa, Severe acute respiratory syndrome coronavirus 2
IVESCGNFK

SEQ ID NO: 4613 - protein, 10 aa, Severe acute respiratory syndrome coronavirus 2
IVESCGNFKV

SEQ ID NO: 4614 - protein, 9 aa, Severe acute respiratory syndrome coronavirus 2
VESCGNFKV

SEQ ID NO: 4615 - protein, 10 aa, Severe acute respiratory syndrome coronavirus 2
ESCGNFKVTK

SEQ ID NO: 4616 - protein, 9 aa, Severe acute respiratory syndrome coronavirus 2
GNFKVTKGK

SEQ ID NO: 4617 - protein, 9 aa, Severe acute respiratory syndrome coronavirus 2
KAKKGAWNI

SEQ ID NO: 4618 - protein, 10 aa, Severe acute respiratory syndrome coronavirus 2
KGAWNIGEQK

SEQ ID NO: 4619 - protein, 9 aa, Severe acute respiratory syndrome coronavirus 2
GAWNIGEQK

SEQ ID NO: 4620 - protein, 10 aa, Severe acute respiratory syndrome coronavirus 2
GEQKSILSPL

SEQ ID NO: 4621 - protein, 10 aa, Severe acute respiratory syndrome coronavirus 2
KSILSPLYAF

SEQ ID NO: 4622 - protein, 10 aa, Severe acute respiratory syndrome coronavirus 2
SILSPLYAFA

SEQ ID NO: 4623 - protein, 9 aa, Severe acute respiratory syndrome coronavirus 2
SPLYAFASE

SEQ ID NO: 4624 - protein, 10 aa, Severe acute respiratory syndrome coronavirus 2
SPLYAFASEA

SEQ ID NO: 4625 - protein, 10 aa, Severe acute respiratory syndrome coronavirus 2
ASEAARVVRS

SEQ ID NO: 4626 - protein, 9 aa, Severe acute respiratory syndrome coronavirus 2
SEAARVVRS

SEQ ID NO: 4627 - protein, 10 aa, Severe acute respiratory syndrome coronavirus 2
SEAARVVRSI

SEQ ID NO: 4628 - protein, 9 aa, Severe acute respiratory syndrome coronavirus 2
EAARVVRSI

SEQ ID NO: 4629 - protein, 9 aa, Severe acute respiratory syndrome coronavirus 2
AARVVRSIF

SEQ ID NO: 4630 - protein, 9 aa, Severe acute respiratory syndrome coronavirus 2
RVVRSIFSR

SEQ ID NO: 4631 - protein, 10 aa, Severe acute respiratory syndrome coronavirus 2
VVRSIFSRTL

SEQ ID NO: 4632 - protein, 9 aa, Severe acute respiratory syndrome coronavirus 2
SIFSRTLET

SEQ ID NO: 4633 - protein, 10 aa, Severe acute respiratory syndrome coronavirus 2
SIFSRTLETA

SEQ ID NO: 4634 - protein, 10 aa, Severe acute respiratory syndrome coronavirus 2
RTLETAQNSV

SEQ ID NO: 4635 - protein, 9 aa, Severe acute respiratory syndrome coronavirus 2
TLETAQNSV

SEQ ID NO: 4636 - protein, 10 aa, Severe acute respiratory syndrome coronavirus 2
TLETAQNSVR

SEQ ID NO: 4637 - protein, 9 aa, Severe acute respiratory syndrome coronavirus 2
ETAQNSVRV

SEQ ID NO: 4638 - protein, 9 aa, Severe acute respiratory syndrome coronavirus 2
TAQNSVRVL

SEQ ID NO: 4639 - protein, 10 aa, Severe acute respiratory syndrome coronavirus 2
AQNSVRVLQK

SEQ ID NO: 4640 - protein, 9 aa, Severe acute respiratory syndrome coronavirus 2
SVRVLQKAA

SEQ ID NO: 4641 - protein, 10 aa, Severe acute respiratory syndrome coronavirus 2
SVRVLQKAAI

SEQ ID NO: 4642 - protein, 9 aa, Severe acute respiratory syndrome coronavirus 2
VLQKAAITI

SEQ ID NO: 4643 - protein, 10 aa, Severe acute respiratory syndrome coronavirus 2
ITILDGISQY

SEQ ID NO: 4644 - protein, 9 aa, Severe acute respiratory syndrome coronavirus 2
TILDGISQY

SEQ ID NO: 4645 - protein, 10 aa, Severe acute respiratory syndrome coronavirus 2
TILDGISQYS

SEQ ID NO: 4646 - protein, 9 aa, Severe acute respiratory syndrome coronavirus 2
ILDGISQYS

SEQ ID NO: 4647 - protein, 10 aa, Severe acute respiratory syndrome coronavirus 2
ILDGISQYSL

SEQ ID NO: 4648 - protein, 9 aa, Severe acute respiratory syndrome coronavirus 2
GISQYSLRL

SEQ ID NO: 4649 - protein, 10 aa, Severe acute respiratory syndrome coronavirus 2
YSLRLIDAMM

SEQ ID NO: 4650 - protein, 9 aa, Severe acute respiratory syndrome coronavirus 2
SLRLIDAMM

SEQ ID NO: 4651 - protein, 9 aa, Severe acute respiratory syndrome coronavirus 2
RLIDAMMFT

SEQ ID NO: 4652 - protein, 10 aa, Severe acute respiratory syndrome coronavirus 2
RLIDAMMFTS

SEQ ID NO: 4653 - protein, 9 aa, Severe acute respiratory syndrome coronavirus 2
LIDAMMFTS

SEQ ID NO: 4654 - protein, 10 aa, Severe acute respiratory syndrome coronavirus 2
LIDAMMFTSD

SEQ ID NO: 4655 - protein, 9 aa, Severe acute respiratory syndrome coronavirus 2
AMMFTSDLA

SEQ ID NO: 4656 - protein, 10 aa, Severe acute respiratory syndrome coronavirus 2
AMMFTSDLAT

SEQ ID NO: 4657 - protein, 9 aa, Severe acute respiratory syndrome coronavirus 2
MMFTSDLAT

SEQ ID NO: 4658 - protein, 10 aa, Severe acute respiratory syndrome coronavirus 2
MMFTSDLATN

SEQ ID NO: 4659 - protein, 9 aa, Severe acute respiratory syndrome coronavirus 2
FTSDLATNN

SEQ ID NO: 4660 - protein, 10 aa, Severe acute respiratory syndrome coronavirus 2
FTSDLATNNL

SEQ ID NO: 4661 - protein, 9 aa, Severe acute respiratory syndrome coronavirus 2
TSDLATNNL

SEQ ID NO: 4662 - protein, 10 aa, Severe acute respiratory syndrome coronavirus 2
TSDLATNNLV

SEQ ID NO: 4663 - protein, 10 aa, Severe acute respiratory syndrome coronavirus 2
SDLATNNLVV

SEQ ID NO: 4664 - protein, 9 aa, Severe acute respiratory syndrome coronavirus 2
LATNNLVVM

SEQ ID NO: 4665 - protein, 10 aa, Severe acute respiratory syndrome coronavirus 2
ATNNLVVMAY

SEQ ID NO: 4666 - protein, 10 aa, Severe acute respiratory syndrome coronavirus 2
VVMAYITGGV

SEQ ID NO: 4667 - protein, 9 aa, Severe acute respiratory syndrome coronavirus 2
VMAYITGGV

SEQ ID NO: 4668 - protein, 10 aa, Severe acute respiratory syndrome coronavirus 2
VMAYITGGVV

SEQ ID NO: 4669 - protein, 9 aa, Severe acute respiratory syndrome coronavirus 2
MAYITGGVV

SEQ ID NO: 4670 - protein, 10 aa, Severe acute respiratory syndrome coronavirus 2
MAYITGGVVQ

SEQ ID NO: 4671 - protein, 10 aa, Severe acute respiratory syndrome coronavirus 2
AYITGGVVQL

SEQ ID NO: 4672 - protein, 9 aa, Severe acute respiratory syndrome coronavirus 2
YITGGVVQL

SEQ ID NO: 4673 - protein, 10 aa, Severe acute respiratory syndrome coronavirus 2
YITGGVVQLT

SEQ ID NO: 4674 - protein, 10 aa, Severe acute respiratory syndrome coronavirus 2
GGVVQLTSQW

SEQ ID NO: 4675 - protein, 9 aa, Severe acute respiratory syndrome coronavirus 2
GVVQLTSQW

SEQ ID NO: 4676 - protein, 10 aa, Severe acute respiratory syndrome coronavirus 2
QLTSQWLTNI

SEQ ID NO: 4677 - protein, 9 aa, Severe acute respiratory syndrome coronavirus 2
LTSQWLTNI

SEQ ID NO: 4678 - protein, 10 aa, Severe acute respiratory syndrome coronavirus 2
LTSQWLTNIF

SEQ ID NO: 4679 - protein, 9 aa, Severe acute respiratory syndrome coronavirus 2
TSQWLTNIF

SEQ ID NO: 4680 - protein, 10 aa, Severe acute respiratory syndrome coronavirus 2
SQWLTNIFGT

SEQ ID NO: 4681 - protein, 9 aa, Severe acute respiratory syndrome coronavirus 2
QWLTNIFGT

SEQ ID NO: 4682 - protein, 10 aa, Severe acute respiratory syndrome coronavirus 2
QWLTNIFGTV

SEQ ID NO: 4683 - protein, 9 aa, Severe acute respiratory syndrome coronavirus 2
WLTNIFGTV

SEQ ID NO: 4684 - protein, 10 aa, Severe acute respiratory syndrome coronavirus 2
WLTNIFGTVY

SEQ ID NO: 4685 - protein, 9 aa, Severe acute respiratory syndrome coronavirus 2
LTNIFGTVY

SEQ ID NO: 4686 - protein, 10 aa, Severe acute respiratory syndrome coronavirus 2
LTNIFGTVYE

SEQ ID NO: 4687 - protein, 9 aa, Severe acute respiratory syndrome coronavirus 2
NIFGTVYEK

SEQ ID NO: 4688 - protein, 10 aa, Severe acute respiratory syndrome coronavirus 2
TVYEKLKPVL

SEQ ID NO: 4689 - protein, 9 aa, Severe acute respiratory syndrome coronavirus 2
VYEKLKPVL

SEQ ID NO: 4690 - protein, 10 aa, Severe acute respiratory syndrome coronavirus 2
YEKLKPVLDW

SEQ ID NO: 4691 - protein, 9 aa, Severe acute respiratory syndrome coronavirus 2
KLKPVLDWL

SEQ ID NO: 4692 - protein, 10 aa, Severe acute respiratory syndrome coronavirus 2
PVLDWLEEKF

SEQ ID NO: 4693 - protein, 10 aa, Severe acute respiratory syndrome coronavirus 2
VLDWLEEKFK

SEQ ID NO: 4694 - protein, 10 aa, Severe acute respiratory syndrome coronavirus 2
WLEEKFKEGV

SEQ ID NO: 4695 - protein, 10 aa, Severe acute respiratory syndrome coronavirus 2
EEKFKEGVEF

SEQ ID NO: 4696 - protein, 9 aa, Severe acute respiratory syndrome coronavirus 2
KFKEGVEFL

SEQ ID NO: 4697 - protein, 10 aa, Severe acute respiratory syndrome coronavirus 2
KEGVEFLRDG

SEQ ID NO: 4698 - protein, 10 aa, Severe acute respiratory syndrome coronavirus 2
EGVEFLRDGW

SEQ ID NO: 4699 - protein, 10 aa, Severe acute respiratory syndrome coronavirus 2
VEFLRDGWEI

SEQ ID NO: 4700 - protein, 9 aa, Severe acute respiratory syndrome coronavirus 2
EFLRDGWEI

SEQ ID NO: 4701 - protein, 9 aa, Severe acute respiratory syndrome coronavirus 2
FLRDGWEIV

SEQ ID NO: 4702 - protein, 10 aa, Severe acute respiratory syndrome coronavirus 2
FLRDGWEIVK

SEQ ID NO: 4703 - protein, 9 aa, Severe acute respiratory syndrome coronavirus 2
RDGWEIVKF

SEQ ID NO: 4704 - protein, 9 aa, Severe acute respiratory syndrome coronavirus 2
WEIVKFIST

SEQ ID NO: 4705 - protein, 10 aa, Severe acute respiratory syndrome coronavirus 2
WEIVKFISTC

SEQ ID NO: 4706 - protein, 9 aa, Severe acute respiratory syndrome coronavirus 2
IVKFISTCA

SEQ ID NO: 4707 - protein, 9 aa, Severe acute respiratory syndrome coronavirus 2
KFISTCACE

SEQ ID NO: 4708 - protein, 10 aa, Severe acute respiratory syndrome coronavirus 2
KFISTCACEI

SEQ ID NO: 4709 - protein, 9 aa, Severe acute respiratory syndrome coronavirus 2
FISTCACEI

SEQ ID NO: 4710 - protein, 10 aa, Severe acute respiratory syndrome coronavirus 2
FISTCACEIV

SEQ ID NO: 4711 - protein, 9 aa, Severe acute respiratory syndrome coronavirus 2
CEIVGGQIV

SEQ ID NO: 4712 - protein, 10 aa, Severe acute respiratory syndrome coronavirus 2
GQIVTCAKEI

SEQ ID NO: 4713 - protein, 10 aa, Severe acute respiratory syndrome coronavirus 2
QIVTCAKEIK

SEQ ID NO: 4714 - protein, 9 aa, Severe acute respiratory syndrome coronavirus 2
KEIKESVQT

SEQ ID NO: 4715 - protein, 10 aa, Severe acute respiratory syndrome coronavirus 2
KEIKESVQTF

SEQ ID NO: 4716 - protein, 9 aa, Severe acute respiratory syndrome coronavirus 2
EIKESVQTF

SEQ ID NO: 4717 - protein, 10 aa, Severe acute respiratory syndrome coronavirus 2
EIKESVQTFF

SEQ ID NO: 4718 - protein, 9 aa, Severe acute respiratory syndrome coronavirus 2
KESVQTFFK

SEQ ID NO: 4719 - protein, 10 aa, Severe acute respiratory syndrome coronavirus 2
KESVQTFFKL

SEQ ID NO: 4720 - protein, 9 aa, Severe acute respiratory syndrome coronavirus 2
ESVQTFFKL

SEQ ID NO: 4721 - protein, 9 aa, Severe acute respiratory syndrome coronavirus 2
SVQTFFKLV

SEQ ID NO: 4722 - protein, 10 aa, Severe acute respiratory syndrome coronavirus 2
VQTFFKLVNK

SEQ ID NO: 4723 - protein, 9 aa, Severe acute respiratory syndrome coronavirus 2
QTFFKLVNK

SEQ ID NO: 4724 - protein, 10 aa, Severe acute respiratory syndrome coronavirus 2
QTFFKLVNKF

SEQ ID NO: 4725 - protein, 9 aa, Severe acute respiratory syndrome coronavirus 2
TFFKLVNKF

SEQ ID NO: 4726 - protein, 10 aa, Severe acute respiratory syndrome coronavirus 2
TFFKLVNKFL

SEQ ID NO: 4727 - protein, 9 aa, Severe acute respiratory syndrome coronavirus 2
FFKLVNKFL

SEQ ID NO: 4728 - protein, 10 aa, Severe acute respiratory syndrome coronavirus 2
FFKLVNKFLA

SEQ ID NO: 4729 - protein, 9 aa, Severe acute respiratory syndrome coronavirus 2
KLVNKFLAL

SEQ ID NO: 4730 - protein, 10 aa, Severe acute respiratory syndrome coronavirus 2
KLVNKFLALC

SEQ ID NO: 4731 - protein, 9 aa, Severe acute respiratory syndrome coronavirus 2
FLALCADSI

SEQ ID NO: 4732 - protein, 10 aa, Severe acute respiratory syndrome coronavirus 2
FLALCADSII

SEQ ID NO: 4733 - protein, 9 aa, Severe acute respiratory syndrome coronavirus 2
ALCADSIII

SEQ ID NO: 4734 - protein, 9 aa, Severe acute respiratory syndrome coronavirus 2
SIIIGGAKL

SEQ ID NO: 4735 - protein, 10 aa, Severe acute respiratory syndrome coronavirus 2
SIIIGGAKLK

SEQ ID NO: 4736 - protein, 9 aa, Severe acute respiratory syndrome coronavirus 2
IIIGGAKLK

SEQ ID NO: 4737 - protein, 10 aa, Severe acute respiratory syndrome coronavirus 2
LKALNLGETF

SEQ ID NO: 4738 - protein, 9 aa, Severe acute respiratory syndrome coronavirus 2
KALNLGETF

SEQ ID NO: 4739 - protein, 10 aa, Severe acute respiratory syndrome coronavirus 2
KALNLGETFV

SEQ ID NO: 4740 - protein, 9 aa, Severe acute respiratory syndrome coronavirus 2
ALNLGETFV

SEQ ID NO: 4741 - protein, 10 aa, Severe acute respiratory syndrome coronavirus 2
ALNLGETFVT

SEQ ID NO: 4742 - protein, 10 aa, Severe acute respiratory syndrome coronavirus 2
LGETFVTHSK

SEQ ID NO: 4743 - protein, 10 aa, Severe acute respiratory syndrome coronavirus 2
GETFVTHSKG

SEQ ID NO: 4744 - protein, 9 aa, Severe acute respiratory syndrome coronavirus 2
TFVTHSKGL

SEQ ID NO: 4745 - protein, 10 aa, Severe acute respiratory syndrome coronavirus 2
TFVTHSKGLY

SEQ ID NO: 4746 - protein, 9 aa, Severe acute respiratory syndrome coronavirus 2
FVTHSKGLY

SEQ ID NO: 4747 - protein, 10 aa, Severe acute respiratory syndrome coronavirus 2
FVTHSKGLYR

SEQ ID NO: 4748 - protein, 10 aa, Severe acute respiratory syndrome coronavirus 2
VTHSKGLYRK

SEQ ID NO: 4749 - protein, 10 aa, Severe acute respiratory syndrome coronavirus 2
GLYRKCVKSR

SEQ ID NO: 4750 - protein, 10 aa, Severe acute respiratory syndrome coronavirus 2
LYRKCVKSRE

SEQ ID NO: 4751 - protein, 10 aa, Severe acute respiratory syndrome coronavirus 2
KSREETGLLM

SEQ ID NO: 4752 - protein, 10 aa, Severe acute respiratory syndrome coronavirus 2
REETGLLMPL

SEQ ID NO: 4753 - protein, 9 aa, Severe acute respiratory syndrome coronavirus 2
EETGLLMPL

SEQ ID NO: 4754 - protein, 10 aa, Severe acute respiratory syndrome coronavirus 2
EETGLLMPLK

SEQ ID NO: 4755 - protein, 10 aa, Severe acute respiratory syndrome coronavirus 2
GLLMPLKAPK

SEQ ID NO: 4756 - protein, 9 aa, Severe acute respiratory syndrome coronavirus 2
LLMPLKAPK

SEQ ID NO: 4757 - protein, 9 aa, Severe acute respiratory syndrome coronavirus 2
MPLKAPKEI

SEQ ID NO: 4758 - protein, 10 aa, Severe acute respiratory syndrome coronavirus 2
MPLKAPKEII

SEQ ID NO: 4759 - protein, 10 aa, Severe acute respiratory syndrome coronavirus 2
APKEIIFLEG

SEQ ID NO: 4760 - protein, 9 aa, Severe acute respiratory syndrome coronavirus 2
KEIIFLEGE

SEQ ID NO: 4761 - protein, 10 aa, Severe acute respiratory syndrome coronavirus 2
KEIIFLEGET

SEQ ID NO: 4762 - protein, 10 aa, Severe acute respiratory syndrome coronavirus 2
EIIFLEGETL

SEQ ID NO: 4763 - protein, 10 aa, Severe acute respiratory syndrome coronavirus 2
FLEGETLPTE

SEQ ID NO: 4764 - protein, 9 aa, Severe acute respiratory syndrome coronavirus 2
GETLPTEVL

SEQ ID NO: 4765 - protein, 10 aa, Severe acute respiratory syndrome coronavirus 2
GETLPTEVLT

SEQ ID NO: 4766 - protein, 10 aa, Severe acute respiratory syndrome coronavirus 2
LPTEVLTEEV

SEQ ID NO: 4767 - protein, 10 aa, Severe acute respiratory syndrome coronavirus 2
TEVLTEEVVL

SEQ ID NO: 4768 - protein, 10 aa, Severe acute respiratory syndrome coronavirus 2
LTEEVVLKTG

SEQ ID NO: 4769 - protein, 9 aa, Severe acute respiratory syndrome coronavirus 2
TEEVVLKTG

SEQ ID NO: 4770 - protein, 10 aa, Severe acute respiratory syndrome coronavirus 2
TEEVVLKTGD

SEQ ID NO: 4771 - protein, 10 aa, Severe acute respiratory syndrome coronavirus 2
EEVVLKTGDL

SEQ ID NO: 4772 - protein, 10 aa, Severe acute respiratory syndrome coronavirus 2
TGDLQPLEQP

SEQ ID NO: 4773 - protein, 10 aa, Severe acute respiratory syndrome coronavirus 2
QPLEQPTSEA

SEQ ID NO: 4774 - protein, 10 aa, Severe acute respiratory syndrome coronavirus 2
TSEAVEAPLV

SEQ ID NO: 4775 - protein, 9 aa, Severe acute respiratory syndrome coronavirus 2
SEAVEAPLV

SEQ ID NO: 4776 - protein, 10 aa, Severe acute respiratory syndrome coronavirus 2
SEAVEAPLVG

SEQ ID NO: 4777 - protein, 10 aa, Severe acute respiratory syndrome coronavirus 2
VEAPLVGTPV

SEQ ID NO: 4778 - protein, 9 aa, Severe acute respiratory syndrome coronavirus 2
APLVGTPVC

SEQ ID NO: 4779 - protein, 10 aa, Severe acute respiratory syndrome coronavirus 2
APLVGTPVCI

SEQ ID NO: 4780 - protein, 9 aa, Severe acute respiratory syndrome coronavirus 2
TPVCINGLM

SEQ ID NO: 4781 - protein, 10 aa, Severe acute respiratory syndrome coronavirus 2
TPVCINGLML

SEQ ID NO: 4782 - protein, 10 aa, Severe acute respiratory syndrome coronavirus 2
CINGLMLLEI

SEQ ID NO: 4783 - protein, 10 aa, Severe acute respiratory syndrome coronavirus 2
MLLEIKDTEK

SEQ ID NO: 4784 - protein, 10 aa, Severe acute respiratory syndrome coronavirus 2
LLEIKDTEKY

SEQ ID NO: 4785 - protein, 10 aa, Severe acute respiratory syndrome coronavirus 2
LEIKDTEKYC

SEQ ID NO: 4786 - protein, 9 aa, Severe acute respiratory syndrome coronavirus 2
DTEKYCALA

SEQ ID NO: 4787 - protein, 10 aa, Severe acute respiratory syndrome coronavirus 2
KYCALAPNMM

SEQ ID NO: 4788 - protein, 9 aa, Severe acute respiratory syndrome coronavirus 2
YCALAPNMM

SEQ ID NO: 4789 - protein, 9 aa, Severe acute respiratory syndrome coronavirus 2
ALAPNMMVT

SEQ ID NO: 4790 - protein, 10 aa, Severe acute respiratory syndrome coronavirus 2
ALAPNMMVTN

SEQ ID NO: 4791 - protein, 10 aa, Severe acute respiratory syndrome coronavirus 2
PNMMVTNNTF

SEQ ID NO: 4792 - protein, 9 aa, Severe acute respiratory syndrome coronavirus 2
NMMVTNNTF

SEQ ID NO: 4793 - protein, 10 aa, Severe acute respiratory syndrome coronavirus 2
NMMVTNNTFT

SEQ ID NO: 4794 - protein, 9 aa, Severe acute respiratory syndrome coronavirus 2
MMVTNNTFT

SEQ ID NO: 4795 - protein, 10 aa, Severe acute respiratory syndrome coronavirus 2
MMVTNNTFTL

SEQ ID NO: 4796 - protein, 9 aa, Severe acute respiratory syndrome coronavirus 2
MVTNNTFTL

SEQ ID NO: 4797 - protein, 10 aa, Severe acute respiratory syndrome coronavirus 2
MVTNNTFTLK

SEQ ID NO: 4798 - protein, 9 aa, Severe acute respiratory syndrome coronavirus 2
VTNNTFTLK

SEQ ID NO: 4799 - protein, 10 aa, Severe acute respiratory syndrome coronavirus 2
APTKVTFGDD

SEQ ID NO: 4800 - protein, 10 aa, Severe acute respiratory syndrome coronavirus 2
KVTFGDDTVI

SEQ ID NO: 4801 - protein, 9 aa, Severe acute respiratory syndrome coronavirus 2
FGDDTVIEV

SEQ ID NO: 4802 - protein, 9 aa, Severe acute respiratory syndrome coronavirus 2
DTVIEVQGY

SEQ ID NO: 4803 - protein, 10 aa, Severe acute respiratory syndrome coronavirus 2
DTVIEVQGYK

SEQ ID NO: 4804 - protein, 9 aa, Severe acute respiratory syndrome coronavirus 2
TVIEVQGYK

SEQ ID NO: 4805 - protein, 9 aa, Severe acute respiratory syndrome coronavirus 2
IEVQGYKSV

SEQ ID NO: 4806 - protein, 10 aa, Severe acute respiratory syndrome coronavirus 2
QGYKSVNITF

SEQ ID NO: 4807 - protein, 9 aa, Severe acute respiratory syndrome coronavirus 2
GYKSVNITF

SEQ ID NO: 4808 - protein, 10 aa, Severe acute respiratory syndrome coronavirus 2
GYKSVNITFE

SEQ ID NO: 4809 - protein, 10 aa, Severe acute respiratory syndrome coronavirus 2
YKSVNITFEL

SEQ ID NO: 4810 - protein, 9 aa, Severe acute respiratory syndrome coronavirus 2
ELDERIDKV

SEQ ID NO: 4811 - protein, 9 aa, Severe acute respiratory syndrome coronavirus 2
RIDKVLNEK

SEQ ID NO: 4812 - protein, 10 aa, Severe acute respiratory syndrome coronavirus 2
KVLNEKCSAY

SEQ ID NO: 4813 - protein, 9 aa, Severe acute respiratory syndrome coronavirus 2
VLNEKCSAY

SEQ ID NO: 4814 - protein, 10 aa, Severe acute respiratory syndrome coronavirus 2
VLNEKCSAYT

SEQ ID NO: 4815 - protein, 9 aa, Severe acute respiratory syndrome coronavirus 2
NEKCSAYTV

SEQ ID NO: 4816 - protein, 9 aa, Severe acute respiratory syndrome coronavirus 2
YTVELGTEV

SEQ ID NO: 4817 - protein, 10 aa, Severe acute respiratory syndrome coronavirus 2
TVELGTEVNE

SEQ ID NO: 4818 - protein, 10 aa, Severe acute respiratory syndrome coronavirus 2
VELGTEVNEF

SEQ ID NO: 4819 - protein, 9 aa, Severe acute respiratory syndrome coronavirus 2
ELGTEVNEF

SEQ ID NO: 4820 - protein, 9 aa, Severe acute respiratory syndrome coronavirus 2
GTEVNEFAC

SEQ ID NO: 4821 - protein, 9 aa, Severe acute respiratory syndrome coronavirus 2
TEVNEFACV

SEQ ID NO: 4822 - protein, 9 aa, Severe acute respiratory syndrome coronavirus 2
NEFACVVAD

SEQ ID NO: 4823 - protein, 10 aa, Severe acute respiratory syndrome coronavirus 2
NEFACVVADA

SEQ ID NO: 4824 - protein, 10 aa, Severe acute respiratory syndrome coronavirus 2
FACVVADAVI

SEQ ID NO: 4825 - protein, 10 aa, Severe acute respiratory syndrome coronavirus 2
VADAVIKTLQ

SEQ ID NO: 4826 - protein, 9 aa, Severe acute respiratory syndrome coronavirus 2
AVIKTLQPV

SEQ ID NO: 4827 - protein, 10 aa, Severe acute respiratory syndrome coronavirus 2
TLQPVSELLT

SEQ ID NO: 4828 - protein, 10 aa, Severe acute respiratory syndrome coronavirus 2
VSELLTPLGI

SEQ ID NO: 4829 - protein, 10 aa, Severe acute respiratory syndrome coronavirus 2
SELLTPLGID

SEQ ID NO: 4830 - protein, 9 aa, Severe acute respiratory syndrome coronavirus 2
LLTPLGIDL

SEQ ID NO: 4831 - protein, 10 aa, Severe acute respiratory syndrome coronavirus 2
DLDEWSMATY

SEQ ID NO: 4832 - protein, 9 aa, Severe acute respiratory syndrome coronavirus 2
LDEWSMATY

SEQ ID NO: 4833 - protein, 10 aa, Severe acute respiratory syndrome coronavirus 2
LDEWSMATYY

SEQ ID NO: 4834 - protein, 9 aa, Severe acute respiratory syndrome coronavirus 2
DEWSMATYY

SEQ ID NO: 4835 - protein, 10 aa, Severe acute respiratory syndrome coronavirus 2
DEWSMATYYL

SEQ ID NO: 4836 - protein, 9 aa, Severe acute respiratory syndrome coronavirus 2
EWSMATYYL

SEQ ID NO: 4837 - protein, 10 aa, Severe acute respiratory syndrome coronavirus 2
EWSMATYYLF

SEQ ID NO: 4838 - protein, 9 aa, Severe acute respiratory syndrome coronavirus 2
WSMATYYLF

SEQ ID NO: 4839 - protein, 9 aa, Severe acute respiratory syndrome coronavirus 2
SMATYYLFD

SEQ ID NO: 4840 - protein, 10 aa, Severe acute respiratory syndrome coronavirus 2
SMATYYLFDE

SEQ ID NO: 4841 - protein, 10 aa, Severe acute respiratory syndrome coronavirus 2
TYYLFDESGE

SEQ ID NO: 4842 - protein, 10 aa, Severe acute respiratory syndrome coronavirus 2
YYLFDESGEF

SEQ ID NO: 4843 - protein, 9 aa, Severe acute respiratory syndrome coronavirus 2
YLFDESGEF

SEQ ID NO: 4844 - protein, 10 aa, Severe acute respiratory syndrome coronavirus 2
YLFDESGEFK

SEQ ID NO: 4845 - protein, 10 aa, Severe acute respiratory syndrome coronavirus 2
LFDESGEFKL

SEQ ID NO: 4846 - protein, 9 aa, Severe acute respiratory syndrome coronavirus 2
GEFKLASHM

SEQ ID NO: 4847 - protein, 10 aa, Severe acute respiratory syndrome coronavirus 2
GEFKLASHMY

SEQ ID NO: 4848 - protein, 9 aa, Severe acute respiratory syndrome coronavirus 2
KLASHMYCS

SEQ ID NO: 4849 - protein, 10 aa, Severe acute respiratory syndrome coronavirus 2
KLASHMYCSF

SEQ ID NO: 4850 - protein, 9 aa, Severe acute respiratory syndrome coronavirus 2
LASHMYCSF

SEQ ID NO: 4851 - protein, 10 aa, Severe acute respiratory syndrome coronavirus 2
LASHMYCSFY

SEQ ID NO: 4852 - protein, 9 aa, Severe acute respiratory syndrome coronavirus 2
ASHMYCSFY

SEQ ID NO: 4853 - protein, 10 aa, Severe acute respiratory syndrome coronavirus 2
ASHMYCSFYP

SEQ ID NO: 4854 - protein, 9 aa, Severe acute respiratory syndrome coronavirus 2
HMYCSFYPP

SEQ ID NO: 4855 - protein, 10 aa, Severe acute respiratory syndrome coronavirus 2
MYCSFYPPDE

SEQ ID NO: 4856 - protein, 10 aa, Severe acute respiratory syndrome coronavirus 2
EEEGDCEEEE

SEQ ID NO: 4857 - protein, 10 aa, Severe acute respiratory syndrome coronavirus 2
EEGDCEEEEF

SEQ ID NO: 4858 - protein, 9 aa, Severe acute respiratory syndrome coronavirus 2
EEEEFEPST

SEQ ID NO: 4859 - protein, 10 aa, Severe acute respiratory syndrome coronavirus 2
EEEEFEPSTQ

SEQ ID NO: 4860 - protein, 10 aa, Severe acute respiratory syndrome coronavirus 2
EEEFEPSTQY

SEQ ID NO: 4861 - protein, 9 aa, Severe acute respiratory syndrome coronavirus 2
EEFEPSTQY

SEQ ID NO: 4862 - protein, 10 aa, Severe acute respiratory syndrome coronavirus 2
EEFEPSTQYE

SEQ ID NO: 4863 - protein, 10 aa, Severe acute respiratory syndrome coronavirus 2
EFEPSTQYEY

SEQ ID NO: 4864 - protein, 9 aa, Severe acute respiratory syndrome coronavirus 2
FEPSTQYEY

SEQ ID NO: 4865 - protein, 10 aa, Severe acute respiratory syndrome coronavirus 2
STQYEYGTED

SEQ ID NO: 4866 - protein, 10 aa, Severe acute respiratory syndrome coronavirus 2
QYEYGTEDDY

SEQ ID NO: 4867 - protein, 9 aa, Severe acute respiratory syndrome coronavirus 2
GTEDDYQGK

SEQ ID NO: 4868 - protein, 10 aa, Severe acute respiratory syndrome coronavirus 2
GTEDDYQGKP

SEQ ID NO: 4869 - protein, 9 aa, Severe acute respiratory syndrome coronavirus 2
DYQGKPLEF

SEQ ID NO: 4870 - protein, 9 aa, Severe acute respiratory syndrome coronavirus 2
KPLEFGATS

SEQ ID NO: 4871 - protein, 10 aa, Severe acute respiratory syndrome coronavirus 2
KPLEFGATSA

SEQ ID NO: 4872 - protein, 10 aa, Severe acute respiratory syndrome coronavirus 2
LEFGATSAAL

SEQ ID NO: 4873 - protein, 10 aa, Severe acute respiratory syndrome coronavirus 2
TSAALQPEEE

SEQ ID NO: 4874 - protein, 10 aa, Severe acute respiratory syndrome coronavirus 2
PEEEQEEDWL

SEQ ID NO: 4875 - protein, 9 aa, Severe acute respiratory syndrome coronavirus 2
EEEQEEDWL

SEQ ID NO: 4876 - protein, 10 aa, Severe acute respiratory syndrome coronavirus 2
EEEQEEDWLD

SEQ ID NO: 4877 - protein, 9 aa, Severe acute respiratory syndrome coronavirus 2
EEQEEDWLD

SEQ ID NO: 4878 - protein, 10 aa, Severe acute respiratory syndrome coronavirus 2
EEQEEDWLDD

SEQ ID NO: 4879 - protein, 10 aa, Severe acute respiratory syndrome coronavirus 2
QEEDWLDDDS

SEQ ID NO: 4880 - protein, 9 aa, Severe acute respiratory syndrome coronavirus 2
WLDDDSQQT

SEQ ID NO: 4881 - protein, 10 aa, Severe acute respiratory syndrome coronavirus 2
WLDDDSQQTV

SEQ ID NO: 4882 - protein, 9 aa, Severe acute respiratory syndrome coronavirus 2
LDDDSQQTV

SEQ ID NO: 4883 - protein, 10 aa, Severe acute respiratory syndrome coronavirus 2
LDDDSQQTVG

SEQ ID NO: 4884 - protein, 9 aa, Severe acute respiratory syndrome coronavirus 2
GSEDNQTTT

SEQ ID NO: 4885 - protein, 10 aa, Severe acute respiratory syndrome coronavirus 2
GSEDNQTTTI

SEQ ID NO: 4886 - protein, 9 aa, Severe acute respiratory syndrome coronavirus 2
SEDNQTTTI

SEQ ID NO: 4887 - protein, 10 aa, Severe acute respiratory syndrome coronavirus 2
SEDNQTTTIQ

SEQ ID NO: 4888 - protein, 9 aa, Severe acute respiratory syndrome coronavirus 2
NQTTTIQTI

SEQ ID NO: 4889 - protein, 9 aa, Severe acute respiratory syndrome coronavirus 2
TTIQTIVEV

SEQ ID NO: 4890 - protein, 10 aa, Severe acute respiratory syndrome coronavirus 2
IVEVQPQLEM

SEQ ID NO: 4891 - protein, 9 aa, Severe acute respiratory syndrome coronavirus 2
VEVQPQLEM

SEQ ID NO: 4892 - protein, 10 aa, Severe acute respiratory syndrome coronavirus 2
PQLEMELTPV

SEQ ID NO: 4893 - protein, 10 aa, Severe acute respiratory syndrome coronavirus 2
QLEMELTPVV

SEQ ID NO: 4894 - protein, 9 aa, Severe acute respiratory syndrome coronavirus 2
LEMELTPVV

SEQ ID NO: 4895 - protein, 10 aa, Severe acute respiratory syndrome coronavirus 2
EMELTPVVQT

SEQ ID NO: 4896 - protein, 10 aa, Severe acute respiratory syndrome coronavirus 2
MELTPVVQTI

SEQ ID NO: 4897 - protein, 9 aa, Severe acute respiratory syndrome coronavirus 2
TPVVQTIEV

SEQ ID NO: 4898 - protein, 9 aa, Severe acute respiratory syndrome coronavirus 2
VQTIEVNSF

SEQ ID NO: 4899 - protein, 10 aa, Severe acute respiratory syndrome coronavirus 2
TIEVNSFSGY

SEQ ID NO: 4900 - protein, 9 aa, Severe acute respiratory syndrome coronavirus 2
IEVNSFSGY

SEQ ID NO: 4901 - protein, 10 aa, Severe acute respiratory syndrome coronavirus 2
IEVNSFSGYL

SEQ ID NO: 4902 - protein, 9 aa, Severe acute respiratory syndrome coronavirus 2
EVNSFSGYL

SEQ ID NO: 4903 - protein, 10 aa, Severe acute respiratory syndrome coronavirus 2
EVNSFSGYLK

SEQ ID NO: 4904 - protein, 9 aa, Severe acute respiratory syndrome coronavirus 2
VNSFSGYLK

SEQ ID NO: 4905 - protein, 9 aa, Severe acute respiratory syndrome coronavirus 2
NSFSGYLKL

SEQ ID NO: 4906 - protein, 10 aa, Severe acute respiratory syndrome coronavirus 2
SFSGYLKLTD

SEQ ID NO: 4907 - protein, 10 aa, Severe acute respiratory syndrome coronavirus 2
GYLKLTDNVY

SEQ ID NO: 4908 - protein, 9 aa, Severe acute respiratory syndrome coronavirus 2
YLKLTDNVY

SEQ ID NO: 4909 - protein, 10 aa, Severe acute respiratory syndrome coronavirus 2
YLKLTDNVYI

SEQ ID NO: 4910 - protein, 9 aa, Severe acute respiratory syndrome coronavirus 2
KLTDNVYIK

SEQ ID NO: 4911 - protein, 9 aa, Severe acute respiratory syndrome coronavirus 2
LTDNVYIKN

SEQ ID NO: 4912 - protein, 10 aa, Severe acute respiratory syndrome coronavirus 2
LTDNVYIKNA

SEQ ID NO: 4913 - protein, 9 aa, Severe acute respiratory syndrome coronavirus 2
VYIKNADIV

SEQ ID NO: 4914 - protein, 10 aa, Severe acute respiratory syndrome coronavirus 2
NADIVEEAKK

SEQ ID NO: 4915 - protein, 10 aa, Severe acute respiratory syndrome coronavirus 2
IVEEAKKVKP

SEQ ID NO: 4916 - protein, 9 aa, Severe acute respiratory syndrome coronavirus 2
EEAKKVKPT

SEQ ID NO: 4917 - protein, 10 aa, Severe acute respiratory syndrome coronavirus 2
KPTVVVNAAN

SEQ ID NO: 4918 - protein, 10 aa, Severe acute respiratory syndrome coronavirus 2
TVVVNAANVY

SEQ ID NO: 4919 - protein, 10 aa, Severe acute respiratory syndrome coronavirus 2
VVVNAANVYL

SEQ ID NO: 4920 - protein, 9 aa, Severe acute respiratory syndrome coronavirus 2
VVNAANVYL

SEQ ID NO: 4921 - protein, 10 aa, Severe acute respiratory syndrome coronavirus 2
VVNAANVYLK

SEQ ID NO: 4922 - protein, 9 aa, Severe acute respiratory syndrome coronavirus 2
VYLKHGGGV

SEQ ID NO: 4923 - protein, 10 aa, Severe acute respiratory syndrome coronavirus 2
VYLKHGGGVA

SEQ ID NO: 4924 - protein, 9 aa, Severe acute respiratory syndrome coronavirus 2
ALNKATNNA

SEQ ID NO: 4925 - protein, 9 aa, Severe acute respiratory syndrome coronavirus 2
LNKATNNAM

SEQ ID NO: 4926 - protein, 10 aa, Severe acute respiratory syndrome coronavirus 2
NAMQVESDDY

SEQ ID NO: 4927 - protein, 9 aa, Severe acute respiratory syndrome coronavirus 2
AMQVESDDY

SEQ ID NO: 4928 - protein, 9 aa, Severe acute respiratory syndrome coronavirus 2
MQVESDDYI

SEQ ID NO: 4929 - protein, 9 aa, Severe acute respiratory syndrome coronavirus 2
VESDDYIAT

SEQ ID NO: 4930 - protein, 9 aa, Severe acute respiratory syndrome coronavirus 2
ESDDYIATN

SEQ ID NO: 4931 - protein, 10 aa, Severe acute respiratory syndrome coronavirus 2
ESDDYIATNG

SEQ ID NO: 4932 - protein, 9 aa, Severe acute respiratory syndrome coronavirus 2
DYIATNGPL

SEQ ID NO: 4933 - protein, 10 aa, Severe acute respiratory syndrome coronavirus 2
YIATNGPLKV

SEQ ID NO: 4934 - protein, 9 aa, Severe acute respiratory syndrome coronavirus 2
GPLKVGGSC

SEQ ID NO: 4935 - protein, 10 aa, Severe acute respiratory syndrome coronavirus 2
GPLKVGGSCV

SEQ ID NO: 4936 - protein, 10 aa, Severe acute respiratory syndrome coronavirus 2
CVLSGHNLAK

SEQ ID NO: 4937 - protein, 9 aa, Severe acute respiratory syndrome coronavirus 2
VLSGHNLAK

SEQ ID NO: 4938 - protein, 9 aa, Severe acute respiratory syndrome coronavirus 2
NLAKHCLHV

SEQ ID NO: 4939 - protein, 10 aa, Severe acute respiratory syndrome coronavirus 2
NLAKHCLHVV

SEQ ID NO: 4940 - protein, 9 aa, Severe acute respiratory syndrome coronavirus 2
LAKHCLHVV

SEQ ID NO: 4941 - protein, 10 aa, Severe acute respiratory syndrome coronavirus 2
HCLHVVGPNV

SEQ ID NO: 4942 - protein, 9 aa, Severe acute respiratory syndrome coronavirus 2
CLHVVGPNV

SEQ ID NO: 4943 - protein, 9 aa, Severe acute respiratory syndrome coronavirus 2
HVVGPNVNK

SEQ ID NO: 4944 - protein, 10 aa, Severe acute respiratory syndrome coronavirus 2
GPNVNKGEDI

SEQ ID NO: 4945 - protein, 9 aa, Severe acute respiratory syndrome coronavirus 2
KGEDIQLLK

SEQ ID NO: 4946 - protein, 10 aa, Severe acute respiratory syndrome coronavirus 2
GEDIQLLKSA

SEQ ID NO: 4947 - protein, 10 aa, Severe acute respiratory syndrome coronavirus 2
EDIQLLKSAY

SEQ ID NO: 4948 - protein, 9 aa, Severe acute respiratory syndrome coronavirus 2
DIQLLKSAY

SEQ ID NO: 4949 - protein, 9 aa, Severe acute respiratory syndrome coronavirus 2
LLKSAYENF

SEQ ID NO: 4950 - protein, 9 aa, Severe acute respiratory syndrome coronavirus 2
SAYENFNQH

SEQ ID NO: 4951 - protein, 10 aa, Severe acute respiratory syndrome coronavirus 2
YENFNQHEVL

SEQ ID NO: 4952 - protein, 9 aa, Severe acute respiratory syndrome coronavirus 2
NFNQHEVLL

SEQ ID NO: 4953 - protein, 10 aa, Severe acute respiratory syndrome coronavirus 2
QHEVLLAPLL

SEQ ID NO: 4954 - protein, 10 aa, Severe acute respiratory syndrome coronavirus 2
HEVLLAPLLS

SEQ ID NO: 4955 - protein, 10 aa, Severe acute respiratory syndrome coronavirus 2
LLAPLLSAGI

SEQ ID NO: 4956 - protein, 9 aa, Severe acute respiratory syndrome coronavirus 2
APLLSAGIF

SEQ ID NO: 4957 - protein, 10 aa, Severe acute respiratory syndrome coronavirus 2
PLLSAGIFGA

SEQ ID NO: 4958 - protein, 9 aa, Severe acute respiratory syndrome coronavirus 2
LLSAGIFGA

SEQ ID NO: 4959 - protein, 9 aa, Severe acute respiratory syndrome coronavirus 2
LSAGIFGAD

SEQ ID NO: 4960 - protein, 9 aa, Severe acute respiratory syndrome coronavirus 2
FGADPIHSL

SEQ ID NO: 4961 - protein, 9 aa, Severe acute respiratory syndrome coronavirus 2
GADPIHSLR

SEQ ID NO: 4962 - protein, 9 aa, Severe acute respiratory syndrome coronavirus 2
SLRVCVDTV

SEQ ID NO: 4963 - protein, 10 aa, Severe acute respiratory syndrome coronavirus 2
SLRVCVDTVR

SEQ ID NO: 4964 - protein, 9 aa, Severe acute respiratory syndrome coronavirus 2
CVDTVRTNV

SEQ ID NO: 4965 - protein, 10 aa, Severe acute respiratory syndrome coronavirus 2
CVDTVRTNVY

SEQ ID NO: 4966 - protein, 10 aa, Severe acute respiratory syndrome coronavirus 2
TVRTNVYLAV

SEQ ID NO: 4967 - protein, 10 aa, Severe acute respiratory syndrome coronavirus 2
VRTNVYLAVF

SEQ ID NO: 4968 - protein, 9 aa, Severe acute respiratory syndrome coronavirus 2
RTNVYLAVF

SEQ ID NO: 4969 - protein, 9 aa, Severe acute respiratory syndrome coronavirus 2
NVYLAVFDK

SEQ ID NO: 4970 - protein, 9 aa, Severe acute respiratory syndrome coronavirus 2
VYLAVFDKN

SEQ ID NO: 4971 - protein, 10 aa, Severe acute respiratory syndrome coronavirus 2
VYLAVFDKNL

SEQ ID NO: 4972 - protein, 9 aa, Severe acute respiratory syndrome coronavirus 2
YLAVFDKNL

SEQ ID NO: 4973 - protein, 10 aa, Severe acute respiratory syndrome coronavirus 2
YLAVFDKNLY

SEQ ID NO: 4974 - protein, 9 aa, Severe acute respiratory syndrome coronavirus 2
LAVFDKNLY

SEQ ID NO: 4975 - protein, 10 aa, Severe acute respiratory syndrome coronavirus 2
AVFDKNLYDK

SEQ ID NO: 4976 - protein, 10 aa, Severe acute respiratory syndrome coronavirus 2
NLYDKLVSSF

SEQ ID NO: 4977 - protein, 9 aa, Severe acute respiratory syndrome coronavirus 2
LYDKLVSSF

SEQ ID NO: 4978 - protein, 10 aa, Severe acute respiratory syndrome coronavirus 2
LYDKLVSSFL

SEQ ID NO: 4979 - protein, 9 aa, Severe acute respiratory syndrome coronavirus 2
KLVSSFLEM

SEQ ID NO: 4980 - protein, 10 aa, Severe acute respiratory syndrome coronavirus 2
KLVSSFLEMK

SEQ ID NO: 4981 - protein, 9 aa, Severe acute respiratory syndrome coronavirus 2
LVSSFLEMK

SEQ ID NO: 4982 - protein, 10 aa, Severe acute respiratory syndrome coronavirus 2
SSFLEMKSEK

SEQ ID NO: 4983 - protein, 9 aa, Severe acute respiratory syndrome coronavirus 2
SFLEMKSEK

SEQ ID NO: 4984 - protein, 10 aa, Severe acute respiratory syndrome coronavirus 2
FLEMKSEKQV

SEQ ID NO: 4985 - protein, 9 aa, Severe acute respiratory syndrome coronavirus 2
LEMKSEKQV

SEQ ID NO: 4986 - protein, 10 aa, Severe acute respiratory syndrome coronavirus 2
KSEKQVEQKI

SEQ ID NO: 4987 - protein, 9 aa, Severe acute respiratory syndrome coronavirus 2
SEKQVEQKI

SEQ ID NO: 4988 - protein, 9 aa, Severe acute respiratory syndrome coronavirus 2
IPKEEVKPF

SEQ ID NO: 4989 - protein, 10 aa, Severe acute respiratory syndrome coronavirus 2
IPKEEVKPFI

SEQ ID NO: 4990 - protein, 9 aa, Severe acute respiratory syndrome coronavirus 2
KEEVKPFIT

SEQ ID NO: 4991 - protein, 10 aa, Severe acute respiratory syndrome coronavirus 2
KEEVKPFITE

SEQ ID NO: 4992 - protein, 9 aa, Severe acute respiratory syndrome coronavirus 2
EEVKPFITE

SEQ ID NO: 4993 - protein, 10 aa, Severe acute respiratory syndrome coronavirus 2
EVKPFITESK

SEQ ID NO: 4994 - protein, 9 aa, Severe acute respiratory syndrome coronavirus 2
FITESKPSV

SEQ ID NO: 4995 - protein, 10 aa, Severe acute respiratory syndrome coronavirus 2
ITESKPSVEQ

SEQ ID NO: 4996 - protein, 10 aa, Severe acute respiratory syndrome coronavirus 2
KPSVEQRKQD

SEQ ID NO: 4997 - protein, 10 aa, Severe acute respiratory syndrome coronavirus 2
SVEQRKQDDK

SEQ ID NO: 4998 - protein, 9 aa, Severe acute respiratory syndrome coronavirus 2
KIKACVEEV

SEQ ID NO: 4999 - protein, 10 aa, Severe acute respiratory syndrome coronavirus 2
ACVEEVTTTL

SEQ ID NO: 5000 - protein, 10 aa, Severe acute respiratory syndrome coronavirus 2
EEVTTTLEET

SEQ ID NO: 5001 - protein, 10 aa, Severe acute respiratory syndrome coronavirus 2
VTTTLEETKF

SEQ ID NO: 5002 - protein, 9 aa, Severe acute respiratory syndrome coronavirus 2
TTLEETKFL

SEQ ID NO: 5003 - protein, 10 aa, Severe acute respiratory syndrome coronavirus 2
TLEETKFLTE

SEQ ID NO: 5004 - protein, 10 aa, Severe acute respiratory syndrome coronavirus 2
EETKFLTENL

SEQ ID NO: 5005 - protein, 10 aa, Severe acute respiratory syndrome coronavirus 2
TKFLTENLLL

SEQ ID NO: 5006 - protein, 9 aa, Severe acute respiratory syndrome coronavirus 2
KFLTENLLL

SEQ ID NO: 5007 - protein, 10 aa, Severe acute respiratory syndrome coronavirus 2
KFLTENLLLY

SEQ ID NO: 5008 - protein, 10 aa, Severe acute respiratory syndrome coronavirus 2
FLTENLLLYI

SEQ ID NO: 5009 - protein, 9 aa, Severe acute respiratory syndrome coronavirus 2
LTENLLLYI

SEQ ID NO: 5010 - protein, 10 aa, Severe acute respiratory syndrome coronavirus 2
LTENLLLYID

SEQ ID NO: 5011 - protein, 10 aa, Severe acute respiratory syndrome coronavirus 2
TENLLLYIDI

SEQ ID NO: 5012 - protein, 10 aa, Severe acute respiratory syndrome coronavirus 2
LLLYIDINGN

SEQ ID NO: 5013 - protein, 10 aa, Severe acute respiratory syndrome coronavirus 2
LLYIDINGNL

SEQ ID NO: 5014 - protein, 9 aa, Severe acute respiratory syndrome coronavirus 2
LYIDINGNL

SEQ ID NO: 5015 - protein, 10 aa, Severe acute respiratory syndrome coronavirus 2
LYIDINGNLH

SEQ ID NO: 5016 - protein, 9 aa, Severe acute respiratory syndrome coronavirus 2
YIDINGNLH

SEQ ID NO: 5017 - protein, 10 aa, Severe acute respiratory syndrome coronavirus 2
YIDINGNLHP

SEQ ID NO: 5018 - protein, 9 aa, Severe acute respiratory syndrome coronavirus 2
NLHPDSATL

SEQ ID NO: 5019 - protein, 10 aa, Severe acute respiratory syndrome coronavirus 2
NLHPDSATLV

SEQ ID NO: 5020 - protein, 10 aa, Severe acute respiratory syndrome coronavirus 2
HPDSATLVSD

SEQ ID NO: 5021 - protein, 10 aa, Severe acute respiratory syndrome coronavirus 2
TLVSDIDITF

SEQ ID NO: 5022 - protein, 9 aa, Severe acute respiratory syndrome coronavirus 2
LVSDIDITF

SEQ ID NO: 5023 - protein, 10 aa, Severe acute respiratory syndrome coronavirus 2
LVSDIDITFL

SEQ ID NO: 5024 - protein, 9 aa, Severe acute respiratory syndrome coronavirus 2
VSDIDITFL

SEQ ID NO: 5025 - protein, 10 aa, Severe acute respiratory syndrome coronavirus 2
VSDIDITFLK

SEQ ID NO: 5026 - protein, 9 aa, Severe acute respiratory syndrome coronavirus 2
SDIDITFLK

SEQ ID NO: 5027 - protein, 10 aa, Severe acute respiratory syndrome coronavirus 2
SDIDITFLKK

SEQ ID NO: 5028 - protein, 10 aa, Severe acute respiratory syndrome coronavirus 2
DIDITFLKKD

SEQ ID NO: 5029 - protein, 10 aa, Severe acute respiratory syndrome coronavirus 2
ITFLKKDAPY

SEQ ID NO: 5030 - protein, 10 aa, Severe acute respiratory syndrome coronavirus 2
TFLKKDAPYI

SEQ ID NO: 5031 - protein, 9 aa, Severe acute respiratory syndrome coronavirus 2
FLKKDAPYI

SEQ ID NO: 5032 - protein, 10 aa, Severe acute respiratory syndrome coronavirus 2
FLKKDAPYIV

SEQ ID NO: 5033 - protein, 9 aa, Severe acute respiratory syndrome coronavirus 2
APYIVGDVV

SEQ ID NO: 5034 - protein, 10 aa, Severe acute respiratory syndrome coronavirus 2
APYIVGDVVQ

SEQ ID NO: 5035 - protein, 10 aa, Severe acute respiratory syndrome coronavirus 2
VVQEGVLTAV

SEQ ID NO: 5036 - protein, 10 aa, Severe acute respiratory syndrome coronavirus 2
VQEGVLTAVV

SEQ ID NO: 5037 - protein, 9 aa, Severe acute respiratory syndrome coronavirus 2
QEGVLTAVV

SEQ ID NO: 5038 - protein, 10 aa, Severe acute respiratory syndrome coronavirus 2
QEGVLTAVVI

SEQ ID NO: 5039 - protein, 9 aa, Severe acute respiratory syndrome coronavirus 2
VLTAVVIPT

SEQ ID NO: 5040 - protein, 10 aa, Severe acute respiratory syndrome coronavirus 2
VLTAVVIPTK

SEQ ID NO: 5041 - protein, 10 aa, Severe acute respiratory syndrome coronavirus 2
LTAVVIPTKK

SEQ ID NO: 5042 - protein, 10 aa, Severe acute respiratory syndrome coronavirus 2
TKKAGGTTEM

SEQ ID NO: 5043 - protein, 9 aa, Severe acute respiratory syndrome coronavirus 2
KKAGGTTEM

SEQ ID NO: 5044 - protein, 10 aa, Severe acute respiratory syndrome coronavirus 2
TTEMLAKALR

SEQ ID NO: 5045 - protein, 10 aa, Severe acute respiratory syndrome coronavirus 2
TEMLAKALRK

SEQ ID NO: 5046 - protein, 9 aa, Severe acute respiratory syndrome coronavirus 2
EMLAKALRK

SEQ ID NO: 5047 - protein, 9 aa, Severe acute respiratory syndrome coronavirus 2
MLAKALRKV

SEQ ID NO: 5048 - protein, 10 aa, Severe acute respiratory syndrome coronavirus 2
ALRKVPTDNY

SEQ ID NO: 5049 - protein, 10 aa, Severe acute respiratory syndrome coronavirus 2
VPTDNYITTY

SEQ ID NO: 5050 - protein, 9 aa, Severe acute respiratory syndrome coronavirus 2
PTDNYITTY

SEQ ID NO: 5051 - protein, 10 aa, Severe acute respiratory syndrome coronavirus 2
PTDNYITTYP

SEQ ID NO: 5052 - protein, 9 aa, Severe acute respiratory syndrome coronavirus 2
NYITTYPGQ

SEQ ID NO: 5053 - protein, 10 aa, Severe acute respiratory syndrome coronavirus 2
YITTYPGQGL

SEQ ID NO: 5054 - protein, 9 aa, Severe acute respiratory syndrome coronavirus 2
ITTYPGQGL

SEQ ID NO: 5055 - protein, 10 aa, Severe acute respiratory syndrome coronavirus 2
ITTYPGQGLN

SEQ ID NO: 5056 - protein, 10 aa, Severe acute respiratory syndrome coronavirus 2
TTYPGQGLNG

SEQ ID NO: 5057 - protein, 9 aa, Severe acute respiratory syndrome coronavirus 2
YPGQGLNGY

SEQ ID NO: 5058 - protein, 9 aa, Severe acute respiratory syndrome coronavirus 2
GLNGYTVEE

SEQ ID NO: 5059 - protein, 9 aa, Severe acute respiratory syndrome coronavirus 2
YTVEEAKTV

SEQ ID NO: 5060 - protein, 10 aa, Severe acute respiratory syndrome coronavirus 2
TVEEAKTVLK

SEQ ID NO: 5061 - protein, 9 aa, Severe acute respiratory syndrome coronavirus 2
VLKKCKSAF

SEQ ID NO: 5062 - protein, 10 aa, Severe acute respiratory syndrome coronavirus 2
VLKKCKSAFY

SEQ ID NO: 5063 - protein, 10 aa, Severe acute respiratory syndrome coronavirus 2
KKCKSAFYIL

SEQ ID NO: 5064 - protein, 10 aa, Severe acute respiratory syndrome coronavirus 2
KSAFYILPSI

SEQ ID NO: 5065 - protein, 9 aa, Severe acute respiratory syndrome coronavirus 2
SAFYILPSI

SEQ ID NO: 5066 - protein, 10 aa, Severe acute respiratory syndrome coronavirus 2
SAFYILPSII

SEQ ID NO: 5067 - protein, 9 aa, Severe acute respiratory syndrome coronavirus 2
AFYILPSII

SEQ ID NO: 5068 - protein, 9 aa, Severe acute respiratory syndrome coronavirus 2
YILPSIISN

SEQ ID NO: 5069 - protein, 10 aa, Severe acute respiratory syndrome coronavirus 2
ILPSIISNEK

SEQ ID NO: 5070 - protein, 9 aa, Severe acute respiratory syndrome coronavirus 2
LPSIISNEK

SEQ ID NO: 5071 - protein, 10 aa, Severe acute respiratory syndrome coronavirus 2
LPSIISNEKQ

SEQ ID NO: 5072 - protein, 9 aa, Severe acute respiratory syndrome coronavirus 2
NEKQEILGT

SEQ ID NO: 5073 - protein, 10 aa, Severe acute respiratory syndrome coronavirus 2
KQEILGTVSW

SEQ ID NO: 5074 - protein, 9 aa, Severe acute respiratory syndrome coronavirus 2
QEILGTVSW

SEQ ID NO: 5075 - protein, 10 aa, Severe acute respiratory syndrome coronavirus 2
QEILGTVSWN

SEQ ID NO: 5076 - protein, 10 aa, Severe acute respiratory syndrome coronavirus 2
EILGTVSWNL

SEQ ID NO: 5077 - protein, 9 aa, Severe acute respiratory syndrome coronavirus 2
ILGTVSWNL

SEQ ID NO: 5078 - protein, 9 aa, Severe acute respiratory syndrome coronavirus 2
TVSWNLREM

SEQ ID NO: 5079 - protein, 9 aa, Severe acute respiratory syndrome coronavirus 2
NLREMLAHA

SEQ ID NO: 5080 - protein, 10 aa, Severe acute respiratory syndrome coronavirus 2
REMLAHAEET

SEQ ID NO: 5081 - protein, 10 aa, Severe acute respiratory syndrome coronavirus 2
MLAHAEETRK

SEQ ID NO: 5082 - protein, 9 aa, Severe acute respiratory syndrome coronavirus 2
HAEETRKLM

SEQ ID NO: 5083 - protein, 10 aa, Severe acute respiratory syndrome coronavirus 2
HAEETRKLMP

SEQ ID NO: 5084 - protein, 9 aa, Severe acute respiratory syndrome coronavirus 2
AEETRKLMP

SEQ ID NO: 5085 - protein, 10 aa, Severe acute respiratory syndrome coronavirus 2
EETRKLMPVC

SEQ ID NO: 5086 - protein, 9 aa, Severe acute respiratory syndrome coronavirus 2
KLMPVCVET

SEQ ID NO: 5087 - protein, 10 aa, Severe acute respiratory syndrome coronavirus 2
KLMPVCVETK

SEQ ID NO: 5088 - protein, 9 aa, Severe acute respiratory syndrome coronavirus 2
MPVCVETKA

SEQ ID NO: 5089 - protein, 10 aa, Severe acute respiratory syndrome coronavirus 2
MPVCVETKAI

SEQ ID NO: 5090 - protein, 9 aa, Severe acute respiratory syndrome coronavirus 2
VETKAIVST

SEQ ID NO: 5091 - protein, 10 aa, Severe acute respiratory syndrome coronavirus 2
VETKAIVSTI

SEQ ID NO: 5092 - protein, 9 aa, Severe acute respiratory syndrome coronavirus 2
KAIVSTIQR

SEQ ID NO: 5093 - protein, 10 aa, Severe acute respiratory syndrome coronavirus 2
KAIVSTIQRK

SEQ ID NO: 5094 - protein, 9 aa, Severe acute respiratory syndrome coronavirus 2
AIVSTIQRK

SEQ ID NO: 5095 - protein, 10 aa, Severe acute respiratory syndrome coronavirus 2
AIVSTIQRKY

SEQ ID NO: 5096 - protein, 9 aa, Severe acute respiratory syndrome coronavirus 2
IVSTIQRKY

SEQ ID NO: 5097 - protein, 10 aa, Severe acute respiratory syndrome coronavirus 2
IVSTIQRKYK

SEQ ID NO: 5098 - protein, 9 aa, Severe acute respiratory syndrome coronavirus 2
VSTIQRKYK

SEQ ID NO: 5099 - protein, 10 aa, Severe acute respiratory syndrome coronavirus 2
TIQRKYKGIK

SEQ ID NO: 5100 - protein, 9 aa, Severe acute respiratory syndrome coronavirus 2
IQRKYKGIK

SEQ ID NO: 5101 - protein, 9 aa, Severe acute respiratory syndrome coronavirus 2
KIQEGVVDY

SEQ ID NO: 5102 - protein, 9 aa, Severe acute respiratory syndrome coronavirus 2
QEGVVDYGA

SEQ ID NO: 5103 - protein, 10 aa, Severe acute respiratory syndrome coronavirus 2
QEGVVDYGAR

SEQ ID NO: 5104 - protein, 9 aa, Severe acute respiratory syndrome coronavirus 2
GVVDYGARF

SEQ ID NO: 5105 - protein, 10 aa, Severe acute respiratory syndrome coronavirus 2
GVVDYGARFY

SEQ ID NO: 5106 - protein, 9 aa, Severe acute respiratory syndrome coronavirus 2
VVDYGARFY

SEQ ID NO: 5107 - protein, 10 aa, Severe acute respiratory syndrome coronavirus 2
VVDYGARFYF

SEQ ID NO: 5108 - protein, 9 aa, Severe acute respiratory syndrome coronavirus 2
VDYGARFYF

SEQ ID NO: 5109 - protein, 10 aa, Severe acute respiratory syndrome coronavirus 2
VDYGARFYFY

SEQ ID NO: 5110 - protein, 9 aa, Severe acute respiratory syndrome coronavirus 2
DYGARFYFY

SEQ ID NO: 5111 - protein, 10 aa, Severe acute respiratory syndrome coronavirus 2
GARFYFYTSK

SEQ ID NO: 5112 - protein, 9 aa, Severe acute respiratory syndrome coronavirus 2
ARFYFYTSK

SEQ ID NO: 5113 - protein, 9 aa, Severe acute respiratory syndrome coronavirus 2
FYFYTSKTT

SEQ ID NO: 5114 - protein, 10 aa, Severe acute respiratory syndrome coronavirus 2
FYFYTSKTTV

SEQ ID NO: 5115 - protein, 9 aa, Severe acute respiratory syndrome coronavirus 2
YFYTSKTTV

SEQ ID NO: 5116 - protein, 10 aa, Severe acute respiratory syndrome coronavirus 2
FYTSKTTVAS

SEQ ID NO: 5117 - protein, 9 aa, Severe acute respiratory syndrome coronavirus 2
YTSKTTVAS

SEQ ID NO: 5118 - protein, 10 aa, Severe acute respiratory syndrome coronavirus 2
YTSKTTVASL

SEQ ID NO: 5119 - protein, 10 aa, Severe acute respiratory syndrome coronavirus 2
TSKTTVASLI

SEQ ID NO: 5120 - protein, 10 aa, Severe acute respiratory syndrome coronavirus 2
TTVASLINTL

SEQ ID NO: 5121 - protein, 9 aa, Severe acute respiratory syndrome coronavirus 2
TVASLINTL

SEQ ID NO: 5122 - protein, 10 aa, Severe acute respiratory syndrome coronavirus 2
TVASLINTLN

SEQ ID NO: 5123 - protein, 9 aa, Severe acute respiratory syndrome coronavirus 2
SLINTLNDL

SEQ ID NO: 5124 - protein, 9 aa, Severe acute respiratory syndrome coronavirus 2
TLNDLNETL

SEQ ID NO: 5125 - protein, 10 aa, Severe acute respiratory syndrome coronavirus 2
TLNDLNETLV

SEQ ID NO: 5126 - protein, 10 aa, Severe acute respiratory syndrome coronavirus 2
NETLVTMPLG

SEQ ID NO: 5127 - protein, 10 aa, Severe acute respiratory syndrome coronavirus 2
ETLVTMPLGY

SEQ ID NO: 5128 - protein, 9 aa, Severe acute respiratory syndrome coronavirus 2
TLVTMPLGY

SEQ ID NO: 5129 - protein, 10 aa, Severe acute respiratory syndrome coronavirus 2
TLVTMPLGYV

SEQ ID NO: 5130 - protein, 10 aa, Severe acute respiratory syndrome coronavirus 2
VTMPLGYVTH

SEQ ID NO: 5131 - protein, 10 aa, Severe acute respiratory syndrome coronavirus 2
TMPLGYVTHG

SEQ ID NO: 5132 - protein, 10 aa, Severe acute respiratory syndrome coronavirus 2
MPLGYVTHGL

SEQ ID NO: 5133 - protein, 9 aa, Severe acute respiratory syndrome coronavirus 2
PLGYVTHGL

SEQ ID NO: 5134 - protein, 9 aa, Severe acute respiratory syndrome coronavirus 2
GYVTHGLNL

SEQ ID NO: 5135 - protein, 10 aa, Severe acute respiratory syndrome coronavirus 2
GYVTHGLNLE

SEQ ID NO: 5136 - protein, 10 aa, Severe acute respiratory syndrome coronavirus 2
NLEEAARYMR

SEQ ID NO: 5137 - protein, 10 aa, Severe acute respiratory syndrome coronavirus 2
EEAARYMRSL

SEQ ID NO: 5138 - protein, 9 aa, Severe acute respiratory syndrome coronavirus 2
EAARYMRSL

SEQ ID NO: 5139 - protein, 10 aa, Severe acute respiratory syndrome coronavirus 2
EAARYMRSLK

SEQ ID NO: 5140 - protein, 9 aa, Severe acute respiratory syndrome coronavirus 2
AARYMRSLK

SEQ ID NO: 5141 - protein, 9 aa, Severe acute respiratory syndrome coronavirus 2
RYMRSLKVP

SEQ ID NO: 5142 - protein, 10 aa, Severe acute respiratory syndrome coronavirus 2
RYMRSLKVPA

SEQ ID NO: 5143 - protein, 9 aa, Severe acute respiratory syndrome coronavirus 2
YMRSLKVPA

SEQ ID NO: 5144 - protein, 10 aa, Severe acute respiratory syndrome coronavirus 2
YMRSLKVPAT

SEQ ID NO: 5145 - protein, 10 aa, Severe acute respiratory syndrome coronavirus 2
VSSPDAVTAY

SEQ ID NO: 5146 - protein, 9 aa, Severe acute respiratory syndrome coronavirus 2
SSPDAVTAY

SEQ ID NO: 5147 - protein, 10 aa, Severe acute respiratory syndrome coronavirus 2
SPDAVTAYNG

SEQ ID NO: 5148 - protein, 9 aa, Severe acute respiratory syndrome coronavirus 2
AVTAYNGYL

SEQ ID NO: 5149 - protein, 9 aa, Severe acute respiratory syndrome coronavirus 2
VTAYNGYLT

SEQ ID NO: 5150 - protein, 10 aa, Severe acute respiratory syndrome coronavirus 2
VTAYNGYLTS

SEQ ID NO: 5151 - protein, 10 aa, Severe acute respiratory syndrome coronavirus 2
AYNGYLTSSS

SEQ ID NO: 5152 - protein, 10 aa, Severe acute respiratory syndrome coronavirus 2
YNGYLTSSSK

SEQ ID NO: 5153 - protein, 10 aa, Severe acute respiratory syndrome coronavirus 2
LTSSSKTPEE

SEQ ID NO: 5154 - protein, 10 aa, Severe acute respiratory syndrome coronavirus 2
TSSSKTPEEH

SEQ ID NO: 5155 - protein, 9 aa, Severe acute respiratory syndrome coronavirus 2
SSSKTPEEH

SEQ ID NO: 5156 - protein, 10 aa, Severe acute respiratory syndrome coronavirus 2
SSSKTPEEHF

SEQ ID NO: 5157 - protein, 10 aa, Severe acute respiratory syndrome coronavirus 2
TPEEHFIETI

SEQ ID NO: 5158 - protein, 9 aa, Severe acute respiratory syndrome coronavirus 2
PEEHFIETI

SEQ ID NO: 5159 - protein, 10 aa, Severe acute respiratory syndrome coronavirus 2
EEHFIETISL

SEQ ID NO: 5160 - protein, 10 aa, Severe acute respiratory syndrome coronavirus 2
IETISLAGSY

SEQ ID NO: 5161 - protein, 10 aa, Severe acute respiratory syndrome coronavirus 2
ETISLAGSYK

SEQ ID NO: 5162 - protein, 9 aa, Severe acute respiratory syndrome coronavirus 2
TISLAGSYK

SEQ ID NO: 5163 - protein, 9 aa, Severe acute respiratory syndrome coronavirus 2
SLAGSYKDW

SEQ ID NO: 5164 - protein, 10 aa, Severe acute respiratory syndrome coronavirus 2
LAGSYKDWSY

SEQ ID NO: 5165 - protein, 9 aa, Severe acute respiratory syndrome coronavirus 2
AGSYKDWSY

SEQ ID NO: 5166 - protein, 9 aa, Severe acute respiratory syndrome coronavirus 2
GSYKDWSYS

SEQ ID NO: 5167 - protein, 9 aa, Severe acute respiratory syndrome coronavirus 2
SYKDWSYSG

SEQ ID NO: 5168 - protein, 10 aa, Severe acute respiratory syndrome coronavirus 2
YKDWSYSGQS

SEQ ID NO: 5169 - protein, 10 aa, Severe acute respiratory syndrome coronavirus 2
DWSYSGQSTQ

SEQ ID NO: 5170 - protein, 10 aa, Severe acute respiratory syndrome coronavirus 2
WSYSGQSTQL

SEQ ID NO: 5171 - protein, 9 aa, Severe acute respiratory syndrome coronavirus 2
SYSGQSTQL

SEQ ID NO: 5172 - protein, 9 aa, Severe acute respiratory syndrome coronavirus 2
YSGQSTQLG

SEQ ID NO: 5173 - protein, 10 aa, Severe acute respiratory syndrome coronavirus 2
YSGQSTQLGI

SEQ ID NO: 5174 - protein, 10 aa, Severe acute respiratory syndrome coronavirus 2
STQLGIEFLK

SEQ ID NO: 5175 - protein, 9 aa, Severe acute respiratory syndrome coronavirus 2
TQLGIEFLK

SEQ ID NO: 5176 - protein, 9 aa, Severe acute respiratory syndrome coronavirus 2
FLKRGDKSV

SEQ ID NO: 5177 - protein, 10 aa, Severe acute respiratory syndrome coronavirus 2
FLKRGDKSVY

SEQ ID NO: 5178 - protein, 9 aa, Severe acute respiratory syndrome coronavirus 2
KRGDKSVYY

SEQ ID NO: 5179 - protein, 9 aa, Severe acute respiratory syndrome coronavirus 2
SVYYTSNPT

SEQ ID NO: 5180 - protein, 9 aa, Severe acute respiratory syndrome coronavirus 2
VYYTSNPTT

SEQ ID NO: 5181 - protein, 10 aa, Severe acute respiratory syndrome coronavirus 2
VYYTSNPTTF

SEQ ID NO: 5182 - protein, 9 aa, Severe acute respiratory syndrome coronavirus 2
YYTSNPTTF

SEQ ID NO: 5183 - protein, 10 aa, Severe acute respiratory syndrome coronavirus 2
YYTSNPTTFH

SEQ ID NO: 5184 - protein, 9 aa, Severe acute respiratory syndrome coronavirus 2
YTSNPTTFH

SEQ ID NO: 5185 - protein, 10 aa, Severe acute respiratory syndrome coronavirus 2
YTSNPTTFHL

SEQ ID NO: 5186 - protein, 9 aa, Severe acute respiratory syndrome coronavirus 2
TSNPTTFHL

SEQ ID NO: 5187 - protein, 10 aa, Severe acute respiratory syndrome coronavirus 2
TSNPTTFHLD

SEQ ID NO: 5188 - protein, 9 aa, Severe acute respiratory syndrome coronavirus 2
TTFHLDGEV

SEQ ID NO: 5189 - protein, 9 aa, Severe acute respiratory syndrome coronavirus 2
TFHLDGEVI

SEQ ID NO: 5190 - protein, 9 aa, Severe acute respiratory syndrome coronavirus 2
HLDGEVITF

SEQ ID NO: 5191 - protein, 10 aa, Severe acute respiratory syndrome coronavirus 2
HLDGEVITFD

SEQ ID NO: 5192 - protein, 9 aa, Severe acute respiratory syndrome coronavirus 2
GEVITFDNL

SEQ ID NO: 5193 - protein, 9 aa, Severe acute respiratory syndrome coronavirus 2
ITFDNLKTL

SEQ ID NO: 5194 - protein, 10 aa, Severe acute respiratory syndrome coronavirus 2
ITFDNLKTLL

SEQ ID NO: 5195 - protein, 10 aa, Severe acute respiratory syndrome coronavirus 2
TFDNLKTLLS

SEQ ID NO: 5196 - protein, 10 aa, Severe acute respiratory syndrome coronavirus 2
LSLREVRTIK

SEQ ID NO: 5197 - protein, 9 aa, Severe acute respiratory syndrome coronavirus 2
SLREVRTIK

SEQ ID NO: 5198 - protein, 10 aa, Severe acute respiratory syndrome coronavirus 2
SLREVRTIKV

SEQ ID NO: 5199 - protein, 9 aa, Severe acute respiratory syndrome coronavirus 2
REVRTIKVF

SEQ ID NO: 5200 - protein, 10 aa, Severe acute respiratory syndrome coronavirus 2
REVRTIKVFT

SEQ ID NO: 5201 - protein, 9 aa, Severe acute respiratory syndrome coronavirus 2
RTIKVFTTV

SEQ ID NO: 5202 - protein, 9 aa, Severe acute respiratory syndrome coronavirus 2
KVFTTVDNI

SEQ ID NO: 5203 - protein, 10 aa, Severe acute respiratory syndrome coronavirus 2
VFTTVDNINL

SEQ ID NO: 5204 - protein, 10 aa, Severe acute respiratory syndrome coronavirus 2
TTVDNINLHT

SEQ ID NO: 5205 - protein, 9 aa, Severe acute respiratory syndrome coronavirus 2
TVDNINLHT

SEQ ID NO: 5206 - protein, 10 aa, Severe acute respiratory syndrome coronavirus 2
TVDNINLHTQ

SEQ ID NO: 5207 - protein, 10 aa, Severe acute respiratory syndrome coronavirus 2
LHTQVVDMSM

SEQ ID NO: 5208 - protein, 9 aa, Severe acute respiratory syndrome coronavirus 2
HTQVVDMSM

SEQ ID NO: 5209 - protein, 10 aa, Severe acute respiratory syndrome coronavirus 2
TQVVDMSMTY

SEQ ID NO: 5210 - protein, 9 aa, Severe acute respiratory syndrome coronavirus 2
QVVDMSMTY

SEQ ID NO: 5211 - protein, 9 aa, Severe acute respiratory syndrome coronavirus 2
VVDMSMTYG

SEQ ID NO: 5212 - protein, 10 aa, Severe acute respiratory syndrome coronavirus 2
VVDMSMTYGQ

SEQ ID NO: 5213 - protein, 10 aa, Severe acute respiratory syndrome coronavirus 2
DMSMTYGQQF

SEQ ID NO: 5214 - protein, 9 aa, Severe acute respiratory syndrome coronavirus 2
MSMTYGQQF

SEQ ID NO: 5215 - protein, 10 aa, Severe acute respiratory syndrome coronavirus 2
MSMTYGQQFG

SEQ ID NO: 5216 - protein, 9 aa, Severe acute respiratory syndrome coronavirus 2
MTYGQQFGP

SEQ ID NO: 5217 - protein, 10 aa, Severe acute respiratory syndrome coronavirus 2
TYGQQFGPTY

SEQ ID NO: 5218 - protein, 9 aa, Severe acute respiratory syndrome coronavirus 2
YGQQFGPTY

SEQ ID NO: 5219 - protein, 9 aa, Severe acute respiratory syndrome coronavirus 2
GQQFGPTYL

SEQ ID NO: 5220 - protein, 10 aa, Severe acute respiratory syndrome coronavirus 2
GPTYLDGADV

SEQ ID NO: 5221 - protein, 10 aa, Severe acute respiratory syndrome coronavirus 2
TYLDGADVTK

SEQ ID NO: 5222 - protein, 10 aa, Severe acute respiratory syndrome coronavirus 2
YLDGADVTKI

SEQ ID NO: 5223 - protein, 9 aa, Severe acute respiratory syndrome coronavirus 2
LDGADVTKI

SEQ ID NO: 5224 - protein, 9 aa, Severe acute respiratory syndrome coronavirus 2
KPHNSHEGK

SEQ ID NO: 5225 - protein, 10 aa, Severe acute respiratory syndrome coronavirus 2
KPHNSHEGKT

SEQ ID NO: 5226 - protein, 10 aa, Severe acute respiratory syndrome coronavirus 2
HNSHEGKTFY

SEQ ID NO: 5227 - protein, 10 aa, Severe acute respiratory syndrome coronavirus 2
SHEGKTFYVL

SEQ ID NO: 5228 - protein, 9 aa, Severe acute respiratory syndrome coronavirus 2
HEGKTFYVL

SEQ ID NO: 5229 - protein, 10 aa, Severe acute respiratory syndrome coronavirus 2
FYVLPNDDTL

SEQ ID NO: 5230 - protein, 9 aa, Severe acute respiratory syndrome coronavirus 2
YVLPNDDTL

SEQ ID NO: 5231 - protein, 10 aa, Severe acute respiratory syndrome coronavirus 2
VLPNDDTLRV

SEQ ID NO: 5232 - protein, 9 aa, Severe acute respiratory syndrome coronavirus 2
LPNDDTLRV

SEQ ID NO: 5233 - protein, 10 aa, Severe acute respiratory syndrome coronavirus 2
LPNDDTLRVE

SEQ ID NO: 5234 - protein, 10 aa, Severe acute respiratory syndrome coronavirus 2
DTLRVEAFEY

SEQ ID NO: 5235 - protein, 9 aa, Severe acute respiratory syndrome coronavirus 2
TLRVEAFEY

SEQ ID NO: 5236 - protein, 10 aa, Severe acute respiratory syndrome coronavirus 2
TLRVEAFEYY

SEQ ID NO: 5237 - protein, 10 aa, Severe acute respiratory syndrome coronavirus 2
RVEAFEYYHT

SEQ ID NO: 5238 - protein, 9 aa, Severe acute respiratory syndrome coronavirus 2
VEAFEYYHT

SEQ ID NO: 5239 - protein, 10 aa, Severe acute respiratory syndrome coronavirus 2
VEAFEYYHTT

SEQ ID NO: 5240 - protein, 10 aa, Severe acute respiratory syndrome coronavirus 2
EYYHTTDPSF

SEQ ID NO: 5241 - protein, 9 aa, Severe acute respiratory syndrome coronavirus 2
YYHTTDPSF

SEQ ID NO: 5242 - protein, 10 aa, Severe acute respiratory syndrome coronavirus 2
YYHTTDPSFL

SEQ ID NO: 5243 - protein, 10 aa, Severe acute respiratory syndrome coronavirus 2
HTTDPSFLGR

SEQ ID NO: 5244 - protein, 9 aa, Severe acute respiratory syndrome coronavirus 2
TTDPSFLGR

SEQ ID NO: 5245 - protein, 10 aa, Severe acute respiratory syndrome coronavirus 2
TTDPSFLGRY

SEQ ID NO: 5246 - protein, 10 aa, Severe acute respiratory syndrome coronavirus 2
TDPSFLGRYM

SEQ ID NO: 5247 - protein, 9 aa, Severe acute respiratory syndrome coronavirus 2
DPSFLGRYM

SEQ ID NO: 5248 - protein, 10 aa, Severe acute respiratory syndrome coronavirus 2
SFLGRYMSAL

SEQ ID NO: 5249 - protein, 9 aa, Severe acute respiratory syndrome coronavirus 2
FLGRYMSAL

SEQ ID NO: 5250 - protein, 9 aa, Severe acute respiratory syndrome coronavirus 2
RYMSALNHT

SEQ ID NO: 5251 - protein, 10 aa, Severe acute respiratory syndrome coronavirus 2
RYMSALNHTK

SEQ ID NO: 5252 - protein, 9 aa, Severe acute respiratory syndrome coronavirus 2
YMSALNHTK

SEQ ID NO: 5253 - protein, 10 aa, Severe acute respiratory syndrome coronavirus 2
YMSALNHTKK

SEQ ID NO: 5254 - protein, 9 aa, Severe acute respiratory syndrome coronavirus 2
MSALNHTKK

SEQ ID NO: 5255 - protein, 10 aa, Severe acute respiratory syndrome coronavirus 2
MSALNHTKKW

SEQ ID NO: 5256 - protein, 9 aa, Severe acute respiratory syndrome coronavirus 2
SALNHTKKW

SEQ ID NO: 5257 - protein, 10 aa, Severe acute respiratory syndrome coronavirus 2
SALNHTKKWK

SEQ ID NO: 5258 - protein, 9 aa, Severe acute respiratory syndrome coronavirus 2
ALNHTKKWK

SEQ ID NO: 5259 - protein, 10 aa, Severe acute respiratory syndrome coronavirus 2
ALNHTKKWKY

SEQ ID NO: 5260 - protein, 10 aa, Severe acute respiratory syndrome coronavirus 2
KWKYPQVNGL

SEQ ID NO: 5261 - protein, 9 aa, Severe acute respiratory syndrome coronavirus 2
KYPQVNGLT

SEQ ID NO: 5262 - protein, 10 aa, Severe acute respiratory syndrome coronavirus 2
KYPQVNGLTS

SEQ ID NO: 5263 - protein, 10 aa, Severe acute respiratory syndrome coronavirus 2
YPQVNGLTSI

SEQ ID NO: 5264 - protein, 10 aa, Severe acute respiratory syndrome coronavirus 2
PQVNGLTSIK

SEQ ID NO: 5265 - protein, 9 aa, Severe acute respiratory syndrome coronavirus 2
QVNGLTSIK

SEQ ID NO: 5266 - protein, 10 aa, Severe acute respiratory syndrome coronavirus 2
SIKWADNNCY

SEQ ID NO: 5267 - protein, 9 aa, Severe acute respiratory syndrome coronavirus 2
IKWADNNCY

SEQ ID NO: 5268 - protein, 9 aa, Severe acute respiratory syndrome coronavirus 2
KWADNNCYL

SEQ ID NO: 5269 - protein, 9 aa, Severe acute respiratory syndrome coronavirus 2
WADNNCYLA

SEQ ID NO: 5270 - protein, 9 aa, Severe acute respiratory syndrome coronavirus 2
ADNNCYLAT

SEQ ID NO: 5271 - protein, 10 aa, Severe acute respiratory syndrome coronavirus 2
ADNNCYLATA

SEQ ID NO: 5272 - protein, 10 aa, Severe acute respiratory syndrome coronavirus 2
NNCYLATALL

SEQ ID NO: 5273 - protein, 10 aa, Severe acute respiratory syndrome coronavirus 2
CYLATALLTL

SEQ ID NO: 5274 - protein, 10 aa, Severe acute respiratory syndrome coronavirus 2
YLATALLTLQ

SEQ ID NO: 5275 - protein, 10 aa, Severe acute respiratory syndrome coronavirus 2
ATALLTLQQI

SEQ ID NO: 5276 - protein, 9 aa, Severe acute respiratory syndrome coronavirus 2
TALLTLQQI

SEQ ID NO: 5277 - protein, 10 aa, Severe acute respiratory syndrome coronavirus 2
ALLTLQQIEL

SEQ ID NO: 5278 - protein, 9 aa, Severe acute respiratory syndrome coronavirus 2
LLTLQQIEL

SEQ ID NO: 5279 - protein, 10 aa, Severe acute respiratory syndrome coronavirus 2
LLTLQQIELK

SEQ ID NO: 5280 - protein, 9 aa, Severe acute respiratory syndrome coronavirus 2
LTLQQIELK

SEQ ID NO: 5281 - protein, 10 aa, Severe acute respiratory syndrome coronavirus 2
LTLQQIELKF

SEQ ID NO: 5282 - protein, 9 aa, Severe acute respiratory syndrome coronavirus 2
TLQQIELKF

SEQ ID NO: 5283 - protein, 9 aa, Severe acute respiratory syndrome coronavirus 2
IELKFNPPA

SEQ ID NO: 5284 - protein, 10 aa, Severe acute respiratory syndrome coronavirus 2
IELKFNPPAL

SEQ ID NO: 5285 - protein, 10 aa, Severe acute respiratory syndrome coronavirus 2
NPPALQDAYY

SEQ ID NO: 5286 - protein, 9 aa, Severe acute respiratory syndrome coronavirus 2
PPALQDAYY

SEQ ID NO: 5287 - protein, 9 aa, Severe acute respiratory syndrome coronavirus 2
ALQDAYYRA

SEQ ID NO: 5288 - protein, 9 aa, Severe acute respiratory syndrome coronavirus 2
GEAANFCAL

SEQ ID NO: 5289 - protein, 10 aa, Severe acute respiratory syndrome coronavirus 2
GEAANFCALI

SEQ ID NO: 5290 - protein, 9 aa, Severe acute respiratory syndrome coronavirus 2
EAANFCALI

SEQ ID NO: 5291 - protein, 10 aa, Severe acute respiratory syndrome coronavirus 2
EAANFCALIL

SEQ ID NO: 5292 - protein, 9 aa, Severe acute respiratory syndrome coronavirus 2
AANFCALIL

SEQ ID NO: 5293 - protein, 10 aa, Severe acute respiratory syndrome coronavirus 2
NFCALILAYC

SEQ ID NO: 5294 - protein, 10 aa, Severe acute respiratory syndrome coronavirus 2
CALILAYCNK

SEQ ID NO: 5295 - protein, 9 aa, Severe acute respiratory syndrome coronavirus 2
ALILAYCNK

SEQ ID NO: 5296 - protein, 10 aa, Severe acute respiratory syndrome coronavirus 2
ALILAYCNKT

SEQ ID NO: 5297 - protein, 9 aa, Severe acute respiratory syndrome coronavirus 2
LILAYCNKT

SEQ ID NO: 5298 - protein, 10 aa, Severe acute respiratory syndrome coronavirus 2
LILAYCNKTV

SEQ ID NO: 5299 - protein, 9 aa, Severe acute respiratory syndrome coronavirus 2
ILAYCNKTV

SEQ ID NO: 5300 - protein, 10 aa, Severe acute respiratory syndrome coronavirus 2
ILAYCNKTVG

SEQ ID NO: 5301 - protein, 10 aa, Severe acute respiratory syndrome coronavirus 2
AYCNKTVGEL

SEQ ID NO: 5302 - protein, 9 aa, Severe acute respiratory syndrome coronavirus 2
GELGDVRET

SEQ ID NO: 5303 - protein, 10 aa, Severe acute respiratory syndrome coronavirus 2
GELGDVRETM

SEQ ID NO: 5304 - protein, 10 aa, Severe acute respiratory syndrome coronavirus 2
LGDVRETMSY

SEQ ID NO: 5305 - protein, 10 aa, Severe acute respiratory syndrome coronavirus 2
GDVRETMSYL

SEQ ID NO: 5306 - protein, 10 aa, Severe acute respiratory syndrome coronavirus 2
DVRETMSYLF

SEQ ID NO: 5307 - protein, 9 aa, Severe acute respiratory syndrome coronavirus 2
RETMSYLFQ

SEQ ID NO: 5308 - protein, 10 aa, Severe acute respiratory syndrome coronavirus 2
RETMSYLFQH

SEQ ID NO: 5309 - protein, 9 aa, Severe acute respiratory syndrome coronavirus 2
ETMSYLFQH

SEQ ID NO: 5310 - protein, 10 aa, Severe acute respiratory syndrome coronavirus 2
ETMSYLFQHA

SEQ ID NO: 5311 - protein, 9 aa, Severe acute respiratory syndrome coronavirus 2
TMSYLFQHA

SEQ ID NO: 5312 - protein, 9 aa, Severe acute respiratory syndrome coronavirus 2
MSYLFQHAN

SEQ ID NO: 5313 - protein, 10 aa, Severe acute respiratory syndrome coronavirus 2
MSYLFQHANL

SEQ ID NO: 5314 - protein, 9 aa, Severe acute respiratory syndrome coronavirus 2
SYLFQHANL

SEQ ID NO: 5315 - protein, 10 aa, Severe acute respiratory syndrome coronavirus 2
FQHANLDSCK

SEQ ID NO: 5316 - protein, 10 aa, Severe acute respiratory syndrome coronavirus 2
NLDSCKRVLN

SEQ ID NO: 5317 - protein, 9 aa, Severe acute respiratory syndrome coronavirus 2
DSCKRVLNV

SEQ ID NO: 5318 - protein, 10 aa, Severe acute respiratory syndrome coronavirus 2
QQTTLKGVEA

SEQ ID NO: 5319 - protein, 10 aa, Severe acute respiratory syndrome coronavirus 2
TTLKGVEAVM

SEQ ID NO: 5320 - protein, 10 aa, Severe acute respiratory syndrome coronavirus 2
VEAVMYMGTL

SEQ ID NO: 5321 - protein, 10 aa, Severe acute respiratory syndrome coronavirus 2
AVMYMGTLSY

SEQ ID NO: 5322 - protein, 9 aa, Severe acute respiratory syndrome coronavirus 2
VMYMGTLSY

SEQ ID NO: 5323 - protein, 10 aa, Severe acute respiratory syndrome coronavirus 2
VMYMGTLSYE

SEQ ID NO: 5324 - protein, 10 aa, Severe acute respiratory syndrome coronavirus 2
MYMGTLSYEQ

SEQ ID NO: 5325 - protein, 9 aa, Severe acute respiratory syndrome coronavirus 2
YMGTLSYEQ

SEQ ID NO: 5326 - protein, 10 aa, Severe acute respiratory syndrome coronavirus 2
YMGTLSYEQF

SEQ ID NO: 5327 - protein, 9 aa, Severe acute respiratory syndrome coronavirus 2
MGTLSYEQF

SEQ ID NO: 5328 - protein, 9 aa, Severe acute respiratory syndrome coronavirus 2
GTLSYEQFK

SEQ ID NO: 5329 - protein, 10 aa, Severe acute respiratory syndrome coronavirus 2
GTLSYEQFKK

SEQ ID NO: 5330 - protein, 9 aa, Severe acute respiratory syndrome coronavirus 2
TLSYEQFKK

SEQ ID NO: 5331 - protein, 10 aa, Severe acute respiratory syndrome coronavirus 2
YEQFKKGVQI

SEQ ID NO: 5332 - protein, 10 aa, Severe acute respiratory syndrome coronavirus 2
GVQIPCTCGK

SEQ ID NO: 5333 - protein, 9 aa, Severe acute respiratory syndrome coronavirus 2
VQIPCTCGK

SEQ ID NO: 5334 - protein, 9 aa, Severe acute respiratory syndrome coronavirus 2
IPCTCGKQA

SEQ ID NO: 5335 - protein, 9 aa, Severe acute respiratory syndrome coronavirus 2
CTCGKQATK

SEQ ID NO: 5336 - protein, 10 aa, Severe acute respiratory syndrome coronavirus 2
CTCGKQATKY

SEQ ID NO: 5337 - protein, 9 aa, Severe acute respiratory syndrome coronavirus 2
TCGKQATKY

SEQ ID NO: 5338 - protein, 10 aa, Severe acute respiratory syndrome coronavirus 2
KYLVQQESPF

SEQ ID NO: 5339 - protein, 10 aa, Severe acute respiratory syndrome coronavirus 2
YLVQQESPFV

SEQ ID NO: 5340 - protein, 9 aa, Severe acute respiratory syndrome coronavirus 2
LVQQESPFV

SEQ ID NO: 5341 - protein, 9 aa, Severe acute respiratory syndrome coronavirus 2
VQQESPFVM

SEQ ID NO: 5342 - protein, 10 aa, Severe acute respiratory syndrome coronavirus 2
QESPFVMMSA

SEQ ID NO: 5343 - protein, 10 aa, Severe acute respiratory syndrome coronavirus 2
SPFVMMSAPP

SEQ ID NO: 5344 - protein, 9 aa, Severe acute respiratory syndrome coronavirus 2
FVMMSAPPA

SEQ ID NO: 5345 - protein, 10 aa, Severe acute respiratory syndrome coronavirus 2
VMMSAPPAQY

SEQ ID NO: 5346 - protein, 9 aa, Severe acute respiratory syndrome coronavirus 2
MMSAPPAQY

SEQ ID NO: 5347 - protein, 9 aa, Severe acute respiratory syndrome coronavirus 2
MSAPPAQYE

SEQ ID NO: 5348 - protein, 10 aa, Severe acute respiratory syndrome coronavirus 2
MSAPPAQYEL

SEQ ID NO: 5349 - protein, 9 aa, Severe acute respiratory syndrome coronavirus 2
SAPPAQYEL

SEQ ID NO: 5350 - protein, 10 aa, Severe acute respiratory syndrome coronavirus 2
SAPPAQYELK

SEQ ID NO: 5351 - protein, 10 aa, Severe acute respiratory syndrome coronavirus 2
AQYELKHGTF

SEQ ID NO: 5352 - protein, 9 aa, Severe acute respiratory syndrome coronavirus 2
QYELKHGTF

SEQ ID NO: 5353 - protein, 10 aa, Severe acute respiratory syndrome coronavirus 2
YELKHGTFTC

SEQ ID NO: 5354 - protein, 10 aa, Severe acute respiratory syndrome coronavirus 2
HGTFTCASEY

SEQ ID NO: 5355 - protein, 9 aa, Severe acute respiratory syndrome coronavirus 2
GTFTCASEY

SEQ ID NO: 5356 - protein, 10 aa, Severe acute respiratory syndrome coronavirus 2
GTFTCASEYT

SEQ ID NO: 5357 - protein, 10 aa, Severe acute respiratory syndrome coronavirus 2
TCASEYTGNY

SEQ ID NO: 5358 - protein, 9 aa, Severe acute respiratory syndrome coronavirus 2
CASEYTGNY

SEQ ID NO: 5359 - protein, 9 aa, Severe acute respiratory syndrome coronavirus 2
ASEYTGNYQ

SEQ ID NO: 5360 - protein, 10 aa, Severe acute respiratory syndrome coronavirus 2
ASEYTGNYQC

SEQ ID NO: 5361 - protein, 9 aa, Severe acute respiratory syndrome coronavirus 2
SEYTGNYQC

SEQ ID NO: 5362 - protein, 9 aa, Severe acute respiratory syndrome coronavirus 2
EYTGNYQCG

SEQ ID NO: 5363 - protein, 9 aa, Severe acute respiratory syndrome coronavirus 2
YTGNYQCGH

SEQ ID NO: 5364 - protein, 10 aa, Severe acute respiratory syndrome coronavirus 2
YTGNYQCGHY

SEQ ID NO: 5365 - protein, 9 aa, Severe acute respiratory syndrome coronavirus 2
TGNYQCGHY

SEQ ID NO: 5366 - protein, 10 aa, Severe acute respiratory syndrome coronavirus 2
TGNYQCGHYK

SEQ ID NO: 5367 - protein, 9 aa, Severe acute respiratory syndrome coronavirus 2
GNYQCGHYK

SEQ ID NO: 5368 - protein, 9 aa, Severe acute respiratory syndrome coronavirus 2
NYQCGHYKH

SEQ ID NO: 5369 - protein, 10 aa, Severe acute respiratory syndrome coronavirus 2
NYQCGHYKHI

SEQ ID NO: 5370 - protein, 9 aa, Severe acute respiratory syndrome coronavirus 2
YQCGHYKHI

SEQ ID NO: 5371 - protein, 10 aa, Severe acute respiratory syndrome coronavirus 2
CGHYKHITSK

SEQ ID NO: 5372 - protein, 9 aa, Severe acute respiratory syndrome coronavirus 2
GHYKHITSK

SEQ ID NO: 5373 - protein, 9 aa, Severe acute respiratory syndrome coronavirus 2
HYKHITSKE

SEQ ID NO: 5374 - protein, 10 aa, Severe acute respiratory syndrome coronavirus 2
KHITSKETLY

SEQ ID NO: 5375 - protein, 9 aa, Severe acute respiratory syndrome coronavirus 2
HITSKETLY

SEQ ID NO: 5376 - protein, 9 aa, Severe acute respiratory syndrome coronavirus 2
ITSKETLYC

SEQ ID NO: 5377 - protein, 10 aa, Severe acute respiratory syndrome coronavirus 2
ITSKETLYCI

SEQ ID NO: 5378 - protein, 9 aa, Severe acute respiratory syndrome coronavirus 2
TSKETLYCI

SEQ ID NO: 5379 - protein, 9 aa, Severe acute respiratory syndrome coronavirus 2
KETLYCIDG

SEQ ID NO: 5380 - protein, 10 aa, Severe acute respiratory syndrome coronavirus 2
KETLYCIDGA

SEQ ID NO: 5381 - protein, 9 aa, Severe acute respiratory syndrome coronavirus 2
TLYCIDGAL

SEQ ID NO: 5382 - protein, 10 aa, Severe acute respiratory syndrome coronavirus 2
TLYCIDGALL

SEQ ID NO: 5383 - protein, 9 aa, Severe acute respiratory syndrome coronavirus 2
LYCIDGALL

SEQ ID NO: 5384 - protein, 10 aa, Severe acute respiratory syndrome coronavirus 2
LYCIDGALLT

SEQ ID NO: 5385 - protein, 10 aa, Severe acute respiratory syndrome coronavirus 2
YCIDGALLTK

SEQ ID NO: 5386 - protein, 9 aa, Severe acute respiratory syndrome coronavirus 2
CIDGALLTK

SEQ ID NO: 5387 - protein, 10 aa, Severe acute respiratory syndrome coronavirus 2
GALLTKSSEY

SEQ ID NO: 5388 - protein, 9 aa, Severe acute respiratory syndrome coronavirus 2
ALLTKSSEY

SEQ ID NO: 5389 - protein, 10 aa, Severe acute respiratory syndrome coronavirus 2
ALLTKSSEYK

SEQ ID NO: 5390 - protein, 9 aa, Severe acute respiratory syndrome coronavirus 2
LLTKSSEYK

SEQ ID NO: 5391 - protein, 10 aa, Severe acute respiratory syndrome coronavirus 2
SSEYKGPITD

SEQ ID NO: 5392 - protein, 10 aa, Severe acute respiratory syndrome coronavirus 2
SEYKGPITDV

SEQ ID NO: 5393 - protein, 10 aa, Severe acute respiratory syndrome coronavirus 2
EYKGPITDVF

SEQ ID NO: 5394 - protein, 9 aa, Severe acute respiratory syndrome coronavirus 2
YKGPITDVF

SEQ ID NO: 5395 - protein, 10 aa, Severe acute respiratory syndrome coronavirus 2
YKGPITDVFY

SEQ ID NO: 5396 - protein, 9 aa, Severe acute respiratory syndrome coronavirus 2
KGPITDVFY

SEQ ID NO: 5397 - protein, 9 aa, Severe acute respiratory syndrome coronavirus 2
ITDVFYKEN

SEQ ID NO: 5398 - protein, 10 aa, Severe acute respiratory syndrome coronavirus 2
ITDVFYKENS

SEQ ID NO: 5399 - protein, 10 aa, Severe acute respiratory syndrome coronavirus 2
TDVFYKENSY

SEQ ID NO: 5400 - protein, 9 aa, Severe acute respiratory syndrome coronavirus 2
DVFYKENSY

SEQ ID NO: 5401 - protein, 10 aa, Severe acute respiratory syndrome coronavirus 2
VFYKENSYTT

SEQ ID NO: 5402 - protein, 9 aa, Severe acute respiratory syndrome coronavirus 2
FYKENSYTT

SEQ ID NO: 5403 - protein, 9 aa, Severe acute respiratory syndrome coronavirus 2
KENSYTTTI

SEQ ID NO: 5404 - protein, 10 aa, Severe acute respiratory syndrome coronavirus 2
KENSYTTTIK

SEQ ID NO: 5405 - protein, 9 aa, Severe acute respiratory syndrome coronavirus 2
SYTTTIKPV

SEQ ID NO: 5406 - protein, 10 aa, Severe acute respiratory syndrome coronavirus 2
SYTTTIKPVT

SEQ ID NO: 5407 - protein, 10 aa, Severe acute respiratory syndrome coronavirus 2
YTTTIKPVTY

SEQ ID NO: 5408 - protein, 9 aa, Severe acute respiratory syndrome coronavirus 2
TTTIKPVTY

SEQ ID NO: 5409 - protein, 10 aa, Severe acute respiratory syndrome coronavirus 2
TTTIKPVTYK

SEQ ID NO: 5410 - protein, 9 aa, Severe acute respiratory syndrome coronavirus 2
TTIKPVTYK

SEQ ID NO: 5411 - protein, 9 aa, Severe acute respiratory syndrome coronavirus 2
TIKPVTYKL

SEQ ID NO: 5412 - protein, 9 aa, Severe acute respiratory syndrome coronavirus 2
VTYKLDGVV

SEQ ID NO: 5413 - protein, 10 aa, Severe acute respiratory syndrome coronavirus 2
TYKLDGVVCT

SEQ ID NO: 5414 - protein, 10 aa, Severe acute respiratory syndrome coronavirus 2
KLDGVVCTEI

SEQ ID NO: 5415 - protein, 10 aa, Severe acute respiratory syndrome coronavirus 2
GVVCTEIDPK

SEQ ID NO: 5416 - protein, 9 aa, Severe acute respiratory syndrome coronavirus 2
VVCTEIDPK

SEQ ID NO: 5417 - protein, 9 aa, Severe acute respiratory syndrome coronavirus 2
CTEIDPKLD

SEQ ID NO: 5418 - protein, 10 aa, Severe acute respiratory syndrome coronavirus 2
CTEIDPKLDN

SEQ ID NO: 5419 - protein, 10 aa, Severe acute respiratory syndrome coronavirus 2
TEIDPKLDNY

SEQ ID NO: 5420 - protein, 9 aa, Severe acute respiratory syndrome coronavirus 2
EIDPKLDNY

SEQ ID NO: 5421 - protein, 10 aa, Severe acute respiratory syndrome coronavirus 2
EIDPKLDNYY

SEQ ID NO: 5422 - protein, 9 aa, Severe acute respiratory syndrome coronavirus 2
IDPKLDNYY

SEQ ID NO: 5423 - protein, 9 aa, Severe acute respiratory syndrome coronavirus 2
NYYKKDNSY

SEQ ID NO: 5424 - protein, 10 aa, Severe acute respiratory syndrome coronavirus 2
NYYKKDNSYF

SEQ ID NO: 5425 - protein, 9 aa, Severe acute respiratory syndrome coronavirus 2
YYKKDNSYF

SEQ ID NO: 5426 - protein, 10 aa, Severe acute respiratory syndrome coronavirus 2
YYKKDNSYFT

SEQ ID NO: 5427 - protein, 10 aa, Severe acute respiratory syndrome coronavirus 2
SYFTEQPIDL

SEQ ID NO: 5428 - protein, 10 aa, Severe acute respiratory syndrome coronavirus 2
FTEQPIDLVP

SEQ ID NO: 5429 - protein, 10 aa, Severe acute respiratory syndrome coronavirus 2
PIDLVPNQPY

SEQ ID NO: 5430 - protein, 9 aa, Severe acute respiratory syndrome coronavirus 2
VPNQPYPNA

SEQ ID NO: 5431 - protein, 10 aa, Severe acute respiratory syndrome coronavirus 2
PNQPYPNASF

SEQ ID NO: 5432 - protein, 9 aa, Severe acute respiratory syndrome coronavirus 2
NQPYPNASF

SEQ ID NO: 5433 - protein, 9 aa, Severe acute respiratory syndrome coronavirus 2
PYPNASFDN

SEQ ID NO: 5434 - protein, 10 aa, Severe acute respiratory syndrome coronavirus 2
PYPNASFDNF

SEQ ID NO: 5435 - protein, 9 aa, Severe acute respiratory syndrome coronavirus 2
YPNASFDNF

SEQ ID NO: 5436 - protein, 9 aa, Severe acute respiratory syndrome coronavirus 2
NASFDNFKF

SEQ ID NO: 5437 - protein, 9 aa, Severe acute respiratory syndrome coronavirus 2
ASFDNFKFV

SEQ ID NO: 5438 - protein, 9 aa, Severe acute respiratory syndrome coronavirus 2
NFKFVCDNI

SEQ ID NO: 5439 - protein, 10 aa, Severe acute respiratory syndrome coronavirus 2
FKFVCDNIKF

SEQ ID NO: 5440 - protein, 9 aa, Severe acute respiratory syndrome coronavirus 2
KFVCDNIKF

SEQ ID NO: 5441 - protein, 9 aa, Severe acute respiratory syndrome coronavirus 2
FVCDNIKFA

SEQ ID NO: 5442 - protein, 9 aa, Severe acute respiratory syndrome coronavirus 2
KFADDLNQL

SEQ ID NO: 5443 - protein, 9 aa, Severe acute respiratory syndrome coronavirus 2
FADDLNQLT

SEQ ID NO: 5444 - protein, 10 aa, Severe acute respiratory syndrome coronavirus 2
FADDLNQLTG

SEQ ID NO: 5445 - protein, 10 aa, Severe acute respiratory syndrome coronavirus 2
ADDLNQLTGY

SEQ ID NO: 5446 - protein, 9 aa, Severe acute respiratory syndrome coronavirus 2
DLNQLTGYK

SEQ ID NO: 5447 - protein, 10 aa, Severe acute respiratory syndrome coronavirus 2
DLNQLTGYKK

SEQ ID NO: 5448 - protein, 10 aa, Severe acute respiratory syndrome coronavirus 2
GYKKPASREL

SEQ ID NO: 5449 - protein, 9 aa, Severe acute respiratory syndrome coronavirus 2
YKKPASREL

SEQ ID NO: 5450 - protein, 9 aa, Severe acute respiratory syndrome coronavirus 2
KPASRELKV

SEQ ID NO: 5451 - protein, 10 aa, Severe acute respiratory syndrome coronavirus 2
KPASRELKVT

SEQ ID NO: 5452 - protein, 10 aa, Severe acute respiratory syndrome coronavirus 2
ASRELKVTFF

SEQ ID NO: 5453 - protein, 9 aa, Severe acute respiratory syndrome coronavirus 2
FPDLNGDVV

SEQ ID NO: 5454 - protein, 10 aa, Severe acute respiratory syndrome coronavirus 2
FPDLNGDVVA

SEQ ID NO: 5455 - protein, 9 aa, Severe acute respiratory syndrome coronavirus 2
NGDVVAIDY

SEQ ID NO: 5456 - protein, 10 aa, Severe acute respiratory syndrome coronavirus 2
DVVAIDYKHY

SEQ ID NO: 5457 - protein, 9 aa, Severe acute respiratory syndrome coronavirus 2
VVAIDYKHY

SEQ ID NO: 5458 - protein, 10 aa, Severe acute respiratory syndrome coronavirus 2
VVAIDYKHYT

SEQ ID NO: 5459 - protein, 10 aa, Severe acute respiratory syndrome coronavirus 2
IDYKHYTPSF

SEQ ID NO: 5460 - protein, 9 aa, Severe acute respiratory syndrome coronavirus 2
DYKHYTPSF

SEQ ID NO: 5461 - protein, 10 aa, Severe acute respiratory syndrome coronavirus 2
DYKHYTPSFK

SEQ ID NO: 5462 - protein, 9 aa, Severe acute respiratory syndrome coronavirus 2
YKHYTPSFK

SEQ ID NO: 5463 - protein, 10 aa, Severe acute respiratory syndrome coronavirus 2
YKHYTPSFKK

SEQ ID NO: 5464 - protein, 9 aa, Severe acute respiratory syndrome coronavirus 2
KHYTPSFKK

SEQ ID NO: 5465 - protein, 9 aa, Severe acute respiratory syndrome coronavirus 2
HYTPSFKKG

SEQ ID NO: 5466 - protein, 10 aa, Severe acute respiratory syndrome coronavirus 2
YTPSFKKGAK

SEQ ID NO: 5467 - protein, 9 aa, Severe acute respiratory syndrome coronavirus 2
TPSFKKGAK

SEQ ID NO: 5468 - protein, 10 aa, Severe acute respiratory syndrome coronavirus 2
TPSFKKGAKL

SEQ ID NO: 5469 - protein, 9 aa, Severe acute respiratory syndrome coronavirus 2
SFKKGAKLL

SEQ ID NO: 5470 - protein, 10 aa, Severe acute respiratory syndrome coronavirus 2
SFKKGAKLLH

SEQ ID NO: 5471 - protein, 9 aa, Severe acute respiratory syndrome coronavirus 2
KLLHKPIVW

SEQ ID NO: 5472 - protein, 10 aa, Severe acute respiratory syndrome coronavirus 2
KLLHKPIVWH

SEQ ID NO: 5473 - protein, 9 aa, Severe acute respiratory syndrome coronavirus 2
LLHKPIVWH

SEQ ID NO: 5474 - protein, 10 aa, Severe acute respiratory syndrome coronavirus 2
LLHKPIVWHV

SEQ ID NO: 5475 - protein, 10 aa, Severe acute respiratory syndrome coronavirus 2
KPIVWHVNNA

SEQ ID NO: 5476 - protein, 9 aa, Severe acute respiratory syndrome coronavirus 2
IVWHVNNAT

SEQ ID NO: 5477 - protein, 10 aa, Severe acute respiratory syndrome coronavirus 2
VWHVNNATNK

SEQ ID NO: 5478 - protein, 9 aa, Severe acute respiratory syndrome coronavirus 2
NNATNKATY

SEQ ID NO: 5479 - protein, 10 aa, Severe acute respiratory syndrome coronavirus 2
NKATYKPNTW

SEQ ID NO: 5480 - protein, 9 aa, Severe acute respiratory syndrome coronavirus 2
KATYKPNTW

SEQ ID NO: 5481 - protein, 9 aa, Severe acute respiratory syndrome coronavirus 2
ATYKPNTWC

SEQ ID NO: 5482 - protein, 10 aa, Severe acute respiratory syndrome coronavirus 2
ATYKPNTWCI

SEQ ID NO: 5483 - protein, 9 aa, Severe acute respiratory syndrome coronavirus 2
TYKPNTWCI

SEQ ID NO: 5484 - protein, 10 aa, Severe acute respiratory syndrome coronavirus 2
TYKPNTWCIR

SEQ ID NO: 5485 - protein, 10 aa, Severe acute respiratory syndrome coronavirus 2
PNTWCIRCLW

SEQ ID NO: 5486 - protein, 9 aa, Severe acute respiratory syndrome coronavirus 2
NTWCIRCLW

SEQ ID NO: 5487 - protein, 10 aa, Severe acute respiratory syndrome coronavirus 2
TWCIRCLWST

SEQ ID NO: 5488 - protein, 10 aa, Severe acute respiratory syndrome coronavirus 2
WCIRCLWSTK

SEQ ID NO: 5489 - protein, 9 aa, Severe acute respiratory syndrome coronavirus 2
CIRCLWSTK

SEQ ID NO: 5490 - protein, 10 aa, Severe acute respiratory syndrome coronavirus 2
LWSTKPVETS

SEQ ID NO: 5491 - protein, 9 aa, Severe acute respiratory syndrome coronavirus 2
KPVETSNSF

SEQ ID NO: 5492 - protein, 10 aa, Severe acute respiratory syndrome coronavirus 2
KPVETSNSFD

SEQ ID NO: 5493 - protein, 10 aa, Severe acute respiratory syndrome coronavirus 2
VETSNSFDVL

SEQ ID NO: 5494 - protein, 9 aa, Severe acute respiratory syndrome coronavirus 2
ETSNSFDVL

SEQ ID NO: 5495 - protein, 10 aa, Severe acute respiratory syndrome coronavirus 2
ETSNSFDVLK

SEQ ID NO: 5496 - protein, 9 aa, Severe acute respiratory syndrome coronavirus 2
TSNSFDVLK

SEQ ID NO: 5497 - protein, 9 aa, Severe acute respiratory syndrome coronavirus 2
KSEDAQGMD

SEQ ID NO: 5498 - protein, 10 aa, Severe acute respiratory syndrome coronavirus 2
KSEDAQGMDN

SEQ ID NO: 5499 - protein, 9 aa, Severe acute respiratory syndrome coronavirus 2
EDAQGMDNL

SEQ ID NO: 5500 - protein, 9 aa, Severe acute respiratory syndrome coronavirus 2
GMDNLACED

SEQ ID NO: 5501 - protein, 10 aa, Severe acute respiratory syndrome coronavirus 2
GMDNLACEDL

SEQ ID NO: 5502 - protein, 10 aa, Severe acute respiratory syndrome coronavirus 2
MDNLACEDLK

SEQ ID NO: 5503 - protein, 10 aa, Severe acute respiratory syndrome coronavirus 2
NLACEDLKPV

SEQ ID NO: 5504 - protein, 10 aa, Severe acute respiratory syndrome coronavirus 2
VSEEVVENPT

SEQ ID NO: 5505 - protein, 10 aa, Severe acute respiratory syndrome coronavirus 2
SEEVVENPTI

SEQ ID NO: 5506 - protein, 9 aa, Severe acute respiratory syndrome coronavirus 2
EEVVENPTI

SEQ ID NO: 5507 - protein, 9 aa, Severe acute respiratory syndrome coronavirus 2
VVENPTIQK

SEQ ID NO: 5508 - protein, 10 aa, Severe acute respiratory syndrome coronavirus 2
VVENPTIQKD

SEQ ID NO: 5509 - protein, 9 aa, Severe acute respiratory syndrome coronavirus 2
NPTIQKDVL

SEQ ID NO: 5510 - protein, 10 aa, Severe acute respiratory syndrome coronavirus 2
VLECNVKTTE

SEQ ID NO: 5511 - protein, 10 aa, Severe acute respiratory syndrome coronavirus 2
LECNVKTTEV

SEQ ID NO: 5512 - protein, 10 aa, Severe acute respiratory syndrome coronavirus 2
KTTEVVGDII

SEQ ID NO: 5513 - protein, 10 aa, Severe acute respiratory syndrome coronavirus 2
TTEVVGDIIL

SEQ ID NO: 5514 - protein, 9 aa, Severe acute respiratory syndrome coronavirus 2
TEVVGDIIL

SEQ ID NO: 5515 - protein, 9 aa, Severe acute respiratory syndrome coronavirus 2
ILKPANNSL

SEQ ID NO: 5516 - protein, 10 aa, Severe acute respiratory syndrome coronavirus 2
ILKPANNSLK

SEQ ID NO: 5517 - protein, 9 aa, Severe acute respiratory syndrome coronavirus 2
KPANNSLKI

SEQ ID NO: 5518 - protein, 10 aa, Severe acute respiratory syndrome coronavirus 2
KPANNSLKIT

SEQ ID NO: 5519 - protein, 9 aa, Severe acute respiratory syndrome coronavirus 2
ITEEVGHTD

SEQ ID NO: 5520 - protein, 10 aa, Severe acute respiratory syndrome coronavirus 2
ITEEVGHTDL

SEQ ID NO: 5521 - protein, 9 aa, Severe acute respiratory syndrome coronavirus 2
TEEVGHTDL

SEQ ID NO: 5522 - protein, 10 aa, Severe acute respiratory syndrome coronavirus 2
TEEVGHTDLM

SEQ ID NO: 5523 - protein, 9 aa, Severe acute respiratory syndrome coronavirus 2
EEVGHTDLM

SEQ ID NO: 5524 - protein, 10 aa, Severe acute respiratory syndrome coronavirus 2
EEVGHTDLMA

SEQ ID NO: 5525 - protein, 9 aa, Severe acute respiratory syndrome coronavirus 2
GHTDLMAAY

SEQ ID NO: 5526 - protein, 9 aa, Severe acute respiratory syndrome coronavirus 2
HTDLMAAYV

SEQ ID NO: 5527 - protein, 10 aa, Severe acute respiratory syndrome coronavirus 2
HTDLMAAYVD

SEQ ID NO: 5528 - protein, 10 aa, Severe acute respiratory syndrome coronavirus 2
MAAYVDNSSL

SEQ ID NO: 5529 - protein, 9 aa, Severe acute respiratory syndrome coronavirus 2
AAYVDNSSL

SEQ ID NO: 5530 - protein, 10 aa, Severe acute respiratory syndrome coronavirus 2
AYVDNSSLTI

SEQ ID NO: 5531 - protein, 10 aa, Severe acute respiratory syndrome coronavirus 2
YVDNSSLTIK

SEQ ID NO: 5532 - protein, 9 aa, Severe acute respiratory syndrome coronavirus 2
LTIKKPNEL

SEQ ID NO: 5533 - protein, 10 aa, Severe acute respiratory syndrome coronavirus 2
TIKKPNELSR

SEQ ID NO: 5534 - protein, 10 aa, Severe acute respiratory syndrome coronavirus 2
KPNELSRVLG

SEQ ID NO: 5535 - protein, 9 aa, Severe acute respiratory syndrome coronavirus 2
ELSRVLGLK

SEQ ID NO: 5536 - protein, 10 aa, Severe acute respiratory syndrome coronavirus 2
GLKTLATHGL

SEQ ID NO: 5537 - protein, 9 aa, Severe acute respiratory syndrome coronavirus 2
KTLATHGLA

SEQ ID NO: 5538 - protein, 9 aa, Severe acute respiratory syndrome coronavirus 2
TLATHGLAA

SEQ ID NO: 5539 - protein, 10 aa, Severe acute respiratory syndrome coronavirus 2
TLATHGLAAV

SEQ ID NO: 5540 - protein, 9 aa, Severe acute respiratory syndrome coronavirus 2
LATHGLAAV

SEQ ID NO: 5541 - protein, 10 aa, Severe acute respiratory syndrome coronavirus 2
SVPWDTIANY

SEQ ID NO: 5542 - protein, 10 aa, Severe acute respiratory syndrome coronavirus 2
VPWDTIANYA

SEQ ID NO: 5543 - protein, 9 aa, Severe acute respiratory syndrome coronavirus 2
TIANYAKPF

SEQ ID NO: 5544 - protein, 10 aa, Severe acute respiratory syndrome coronavirus 2
TIANYAKPFL

SEQ ID NO: 5545 - protein, 10 aa, Severe acute respiratory syndrome coronavirus 2
ANYAKPFLNK

SEQ ID NO: 5546 - protein, 9 aa, Severe acute respiratory syndrome coronavirus 2
NYAKPFLNK

SEQ ID NO: 5547 - protein, 10 aa, Severe acute respiratory syndrome coronavirus 2
NYAKPFLNKV

SEQ ID NO: 5548 - protein, 9 aa, Severe acute respiratory syndrome coronavirus 2
YAKPFLNKV

SEQ ID NO: 5549 - protein, 9 aa, Severe acute respiratory syndrome coronavirus 2
FLNKVVSTT

SEQ ID NO: 5550 - protein, 10 aa, Severe acute respiratory syndrome coronavirus 2
FLNKVVSTTT

SEQ ID NO: 5551 - protein, 9 aa, Severe acute respiratory syndrome coronavirus 2
KVVSTTTNI

SEQ ID NO: 5552 - protein, 10 aa, Severe acute respiratory syndrome coronavirus 2
KVVSTTTNIV

SEQ ID NO: 5553 - protein, 9 aa, Severe acute respiratory syndrome coronavirus 2
VVSTTTNIV

SEQ ID NO: 5554 - protein, 9 aa, Severe acute respiratory syndrome coronavirus 2
STTTNIVTR

SEQ ID NO: 5555 - protein, 9 aa, Severe acute respiratory syndrome coronavirus 2
TTNIVTRCL

SEQ ID NO: 5556 - protein, 10 aa, Severe acute respiratory syndrome coronavirus 2
TTNIVTRCLN

SEQ ID NO: 5557 - protein, 9 aa, Severe acute respiratory syndrome coronavirus 2
IVTRCLNRV

SEQ ID NO: 5558 - protein, 10 aa, Severe acute respiratory syndrome coronavirus 2
RCLNRVCTNY

SEQ ID NO: 5559 - protein, 9 aa, Severe acute respiratory syndrome coronavirus 2
CLNRVCTNY

SEQ ID NO: 5560 - protein, 9 aa, Severe acute respiratory syndrome coronavirus 2
LNRVCTNYM

SEQ ID NO: 5561 - protein, 9 aa, Severe acute respiratory syndrome coronavirus 2
RVCTNYMPY

SEQ ID NO: 5562 - protein, 10 aa, Severe acute respiratory syndrome coronavirus 2
RVCTNYMPYF

SEQ ID NO: 5563 - protein, 9 aa, Severe acute respiratory syndrome coronavirus 2
VCTNYMPYF

SEQ ID NO: 5564 - protein, 10 aa, Severe acute respiratory syndrome coronavirus 2
VCTNYMPYFF

SEQ ID NO: 5565 - protein, 9 aa, Severe acute respiratory syndrome coronavirus 2
CTNYMPYFF

SEQ ID NO: 5566 - protein, 10 aa, Severe acute respiratory syndrome coronavirus 2
CTNYMPYFFT

SEQ ID NO: 5567 - protein, 10 aa, Severe acute respiratory syndrome coronavirus 2
TNYMPYFFTL

SEQ ID NO: 5568 - protein, 9 aa, Severe acute respiratory syndrome coronavirus 2
NYMPYFFTL

SEQ ID NO: 5569 - protein, 10 aa, Severe acute respiratory syndrome coronavirus 2
NYMPYFFTLL

SEQ ID NO: 5570 - protein, 9 aa, Severe acute respiratory syndrome coronavirus 2
YMPYFFTLL

SEQ ID NO: 5571 - protein, 10 aa, Severe acute respiratory syndrome coronavirus 2
YMPYFFTLLL

SEQ ID NO: 5572 - protein, 10 aa, Severe acute respiratory syndrome coronavirus 2
MPYFFTLLLQ

SEQ ID NO: 5573 - protein, 10 aa, Severe acute respiratory syndrome coronavirus 2
PYFFTLLLQL

SEQ ID NO: 5574 - protein, 10 aa, Severe acute respiratory syndrome coronavirus 2
FTLLLQLCTF

SEQ ID NO: 5575 - protein, 9 aa, Severe acute respiratory syndrome coronavirus 2
TLLLQLCTF

SEQ ID NO: 5576 - protein, 10 aa, Severe acute respiratory syndrome coronavirus 2
TLLLQLCTFT

SEQ ID NO: 5577 - protein, 9 aa, Severe acute respiratory syndrome coronavirus 2
LLLQLCTFT

SEQ ID NO: 5578 - protein, 10 aa, Severe acute respiratory syndrome coronavirus 2
LLLQLCTFTR

SEQ ID NO: 5579 - protein, 10 aa, Severe acute respiratory syndrome coronavirus 2
LQLCTFTRST

SEQ ID NO: 5580 - protein, 10 aa, Severe acute respiratory syndrome coronavirus 2
QLCTFTRSTN

SEQ ID NO: 5581 - protein, 9 aa, Severe acute respiratory syndrome coronavirus 2
CTFTRSTNS

SEQ ID NO: 5582 - protein, 10 aa, Severe acute respiratory syndrome coronavirus 2
CTFTRSTNSR

SEQ ID NO: 5583 - protein, 10 aa, Severe acute respiratory syndrome coronavirus 2
TFTRSTNSRI

SEQ ID NO: 5584 - protein, 9 aa, Severe acute respiratory syndrome coronavirus 2
FTRSTNSRI

SEQ ID NO: 5585 - protein, 10 aa, Severe acute respiratory syndrome coronavirus 2
FTRSTNSRIK

SEQ ID NO: 5586 - protein, 10 aa, Severe acute respiratory syndrome coronavirus 2
STNSRIKASM

SEQ ID NO: 5587 - protein, 10 aa, Severe acute respiratory syndrome coronavirus 2
RIKASMPTTI

SEQ ID NO: 5588 - protein, 9 aa, Severe acute respiratory syndrome coronavirus 2
IKASMPTTI

SEQ ID NO: 5589 - protein, 10 aa, Severe acute respiratory syndrome coronavirus 2
KASMPTTIAK

SEQ ID NO: 5590 - protein, 9 aa, Severe acute respiratory syndrome coronavirus 2
ASMPTTIAK

SEQ ID NO: 5591 - protein, 9 aa, Severe acute respiratory syndrome coronavirus 2
MPTTIAKNT

SEQ ID NO: 5592 - protein, 10 aa, Severe acute respiratory syndrome coronavirus 2
MPTTIAKNTV

SEQ ID NO: 5593 - protein, 10 aa, Severe acute respiratory syndrome coronavirus 2
PTTIAKNTVK

SEQ ID NO: 5594 - protein, 9 aa, Severe acute respiratory syndrome coronavirus 2
TTIAKNTVK

SEQ ID NO: 5595 - protein, 9 aa, Severe acute respiratory syndrome coronavirus 2
IAKNTVKSV

SEQ ID NO: 5596 - protein, 10 aa, Severe acute respiratory syndrome coronavirus 2
AKNTVKSVGK

SEQ ID NO: 5597 - protein, 9 aa, Severe acute respiratory syndrome coronavirus 2
KNTVKSVGK

SEQ ID NO: 5598 - protein, 9 aa, Severe acute respiratory syndrome coronavirus 2
NTVKSVGKF

SEQ ID NO: 5599 - protein, 10 aa, Severe acute respiratory syndrome coronavirus 2
VGKFCLEASF

SEQ ID NO: 5600 - protein, 10 aa, Severe acute respiratory syndrome coronavirus 2
KFCLEASFNY

SEQ ID NO: 5601 - protein, 9 aa, Severe acute respiratory syndrome coronavirus 2
FCLEASFNY

SEQ ID NO: 5602 - protein, 10 aa, Severe acute respiratory syndrome coronavirus 2
FCLEASFNYL

SEQ ID NO: 5603 - protein, 9 aa, Severe acute respiratory syndrome coronavirus 2
CLEASFNYL

SEQ ID NO: 5604 - protein, 10 aa, Severe acute respiratory syndrome coronavirus 2
CLEASFNYLK

SEQ ID NO: 5605 - protein, 9 aa, Severe acute respiratory syndrome coronavirus 2
LEASFNYLK

SEQ ID NO: 5606 - protein, 10 aa, Severe acute respiratory syndrome coronavirus 2
SFNYLKSPNF

SEQ ID NO: 5607 - protein, 9 aa, Severe acute respiratory syndrome coronavirus 2
NYLKSPNFS

SEQ ID NO: 5608 - protein, 10 aa, Severe acute respiratory syndrome coronavirus 2
NYLKSPNFSK

SEQ ID NO: 5609 - protein, 9 aa, Severe acute respiratory syndrome coronavirus 2
YLKSPNFSK

SEQ ID NO: 5610 - protein, 10 aa, Severe acute respiratory syndrome coronavirus 2
YLKSPNFSKL

SEQ ID NO: 5611 - protein, 9 aa, Severe acute respiratory syndrome coronavirus 2
LKSPNFSKL

SEQ ID NO: 5612 - protein, 10 aa, Severe acute respiratory syndrome coronavirus 2
SPNFSKLINI

SEQ ID NO: 5613 - protein, 9 aa, Severe acute respiratory syndrome coronavirus 2
NFSKLINII

SEQ ID NO: 5614 - protein, 10 aa, Severe acute respiratory syndrome coronavirus 2
NFSKLINIII

SEQ ID NO: 5615 - protein, 9 aa, Severe acute respiratory syndrome coronavirus 2
SKLINIIIW

SEQ ID NO: 5616 - protein, 9 aa, Severe acute respiratory syndrome coronavirus 2
KLINIIIWF

SEQ ID NO: 5617 - protein, 10 aa, Severe acute respiratory syndrome coronavirus 2
KLINIIIWFL

SEQ ID NO: 5618 - protein, 9 aa, Severe acute respiratory syndrome coronavirus 2
LINIIIWFL

SEQ ID NO: 5619 - protein, 10 aa, Severe acute respiratory syndrome coronavirus 2
LINIIIWFLL

SEQ ID NO: 5620 - protein, 9 aa, Severe acute respiratory syndrome coronavirus 2
INIIIWFLL

SEQ ID NO: 5621 - protein, 10 aa, Severe acute respiratory syndrome coronavirus 2
INIIIWFLLL

SEQ ID NO: 5622 - protein, 9 aa, Severe acute respiratory syndrome coronavirus 2
NIIIWFLLL

SEQ ID NO: 5623 - protein, 10 aa, Severe acute respiratory syndrome coronavirus 2
IIIWFLLLSV

SEQ ID NO: 5624 - protein, 10 aa, Severe acute respiratory syndrome coronavirus 2
IWFLLLSVCL

SEQ ID NO: 5625 - protein, 9 aa, Severe acute respiratory syndrome coronavirus 2
FLLLSVCLG

SEQ ID NO: 5626 - protein, 10 aa, Severe acute respiratory syndrome coronavirus 2
FLLLSVCLGS

SEQ ID NO: 5627 - protein, 10 aa, Severe acute respiratory syndrome coronavirus 2
LLLSVCLGSL

SEQ ID NO: 5628 - protein, 9 aa, Severe acute respiratory syndrome coronavirus 2
LLSVCLGSL

SEQ ID NO: 5629 - protein, 10 aa, Severe acute respiratory syndrome coronavirus 2
LLSVCLGSLI

SEQ ID NO: 5630 - protein, 10 aa, Severe acute respiratory syndrome coronavirus 2
LSVCLGSLIY

SEQ ID NO: 5631 - protein, 10 aa, Severe acute respiratory syndrome coronavirus 2
SVCLGSLIYS

SEQ ID NO: 5632 - protein, 9 aa, Severe acute respiratory syndrome coronavirus 2
SLIYSTAAL

SEQ ID NO: 5633 - protein, 10 aa, Severe acute respiratory syndrome coronavirus 2
LIYSTAALGV

SEQ ID NO: 5634 - protein, 10 aa, Severe acute respiratory syndrome coronavirus 2
IYSTAALGVL

SEQ ID NO: 5635 - protein, 10 aa, Severe acute respiratory syndrome coronavirus 2
YSTAALGVLM

SEQ ID NO: 5636 - protein, 9 aa, Severe acute respiratory syndrome coronavirus 2
ALGVLMSNL

SEQ ID NO: 5637 - protein, 10 aa, Severe acute respiratory syndrome coronavirus 2
VLMSNLGMPS

SEQ ID NO: 5638 - protein, 10 aa, Severe acute respiratory syndrome coronavirus 2
LMSNLGMPSY

SEQ ID NO: 5639 - protein, 9 aa, Severe acute respiratory syndrome coronavirus 2
MSNLGMPSY

SEQ ID NO: 5640 - protein, 10 aa, Severe acute respiratory syndrome coronavirus 2
MSNLGMPSYC

SEQ ID NO: 5641 - protein, 10 aa, Severe acute respiratory syndrome coronavirus 2
LGMPSYCTGY

SEQ ID NO: 5642 - protein, 9 aa, Severe acute respiratory syndrome coronavirus 2
GMPSYCTGY

SEQ ID NO: 5643 - protein, 10 aa, Severe acute respiratory syndrome coronavirus 2
GMPSYCTGYR

SEQ ID NO: 5644 - protein, 9 aa, Severe acute respiratory syndrome coronavirus 2
MPSYCTGYR

SEQ ID NO: 5645 - protein, 10 aa, Severe acute respiratory syndrome coronavirus 2
MPSYCTGYRE

SEQ ID NO: 5646 - protein, 10 aa, Severe acute respiratory syndrome coronavirus 2
SYCTGYREGY

SEQ ID NO: 5647 - protein, 10 aa, Severe acute respiratory syndrome coronavirus 2
GYREGYLNST

SEQ ID NO: 5648 - protein, 10 aa, Severe acute respiratory syndrome coronavirus 2
REGYLNSTNV

SEQ ID NO: 5649 - protein, 10 aa, Severe acute respiratory syndrome coronavirus 2
GYLNSTNVTI

SEQ ID NO: 5650 - protein, 9 aa, Severe acute respiratory syndrome coronavirus 2
YLNSTNVTI

SEQ ID NO: 5651 - protein, 10 aa, Severe acute respiratory syndrome coronavirus 2
YLNSTNVTIA

SEQ ID NO: 5652 - protein, 10 aa, Severe acute respiratory syndrome coronavirus 2
NSTNVTIATY

SEQ ID NO: 5653 - protein, 9 aa, Severe acute respiratory syndrome coronavirus 2
STNVTIATY

SEQ ID NO: 5654 - protein, 10 aa, Severe acute respiratory syndrome coronavirus 2
TIATYCTGSI

SEQ ID NO: 5655 - protein, 9 aa, Severe acute respiratory syndrome coronavirus 2
IATYCTGSI

SEQ ID NO: 5656 - protein, 9 aa, Severe acute respiratory syndrome coronavirus 2
ATYCTGSIP

SEQ ID NO: 5657 - protein, 10 aa, Severe acute respiratory syndrome coronavirus 2
TYCTGSIPCS

SEQ ID NO: 5658 - protein, 10 aa, Severe acute respiratory syndrome coronavirus 2
YCTGSIPCSV

SEQ ID NO: 5659 - protein, 9 aa, Severe acute respiratory syndrome coronavirus 2
CTGSIPCSV

SEQ ID NO: 5660 - protein, 10 aa, Severe acute respiratory syndrome coronavirus 2
IPCSVCLSGL

SEQ ID NO: 5661 - protein, 10 aa, Severe acute respiratory syndrome coronavirus 2
SVCLSGLDSL

SEQ ID NO: 5662 - protein, 10 aa, Severe acute respiratory syndrome coronavirus 2
LSGLDSLDTY

SEQ ID NO: 5663 - protein, 9 aa, Severe acute respiratory syndrome coronavirus 2
SGLDSLDTY

SEQ ID NO: 5664 - protein, 10 aa, Severe acute respiratory syndrome coronavirus 2
SLDTYPSLET

SEQ ID NO: 5665 - protein, 9 aa, Severe acute respiratory syndrome coronavirus 2
DTYPSLETI

SEQ ID NO: 5666 - protein, 10 aa, Severe acute respiratory syndrome coronavirus 2
TYPSLETIQI

SEQ ID NO: 5667 - protein, 9 aa, Severe acute respiratory syndrome coronavirus 2
YPSLETIQI

SEQ ID NO: 5668 - protein, 10 aa, Severe acute respiratory syndrome coronavirus 2
PSLETIQITI

SEQ ID NO: 5669 - protein, 9 aa, Severe acute respiratory syndrome coronavirus 2
SLETIQITI

SEQ ID NO: 5670 - protein, 10 aa, Severe acute respiratory syndrome coronavirus 2
TIQITISSFK

SEQ ID NO: 5671 - protein, 9 aa, Severe acute respiratory syndrome coronavirus 2
IQITISSFK

SEQ ID NO: 5672 - protein, 10 aa, Severe acute respiratory syndrome coronavirus 2
IQITISSFKW

SEQ ID NO: 5673 - protein, 9 aa, Severe acute respiratory syndrome coronavirus 2
QITISSFKW

SEQ ID NO: 5674 - protein, 10 aa, Severe acute respiratory syndrome coronavirus 2
ITISSFKWDL

SEQ ID NO: 5675 - protein, 9 aa, Severe acute respiratory syndrome coronavirus 2
TISSFKWDL

SEQ ID NO: 5676 - protein, 9 aa, Severe acute respiratory syndrome coronavirus 2
SSFKWDLTA

SEQ ID NO: 5677 - protein, 10 aa, Severe acute respiratory syndrome coronavirus 2
SSFKWDLTAF

SEQ ID NO: 5678 - protein, 9 aa, Severe acute respiratory syndrome coronavirus 2
SFKWDLTAF

SEQ ID NO: 5679 - protein, 10 aa, Severe acute respiratory syndrome coronavirus 2
FKWDLTAFGL

SEQ ID NO: 5680 - protein, 9 aa, Severe acute respiratory syndrome coronavirus 2
TAFGLVAEW

SEQ ID NO: 5681 - protein, 10 aa, Severe acute respiratory syndrome coronavirus 2
TAFGLVAEWF

SEQ ID NO: 5682 - protein, 9 aa, Severe acute respiratory syndrome coronavirus 2
AFGLVAEWF

SEQ ID NO: 5683 - protein, 10 aa, Severe acute respiratory syndrome coronavirus 2
AFGLVAEWFL

SEQ ID NO: 5684 - protein, 9 aa, Severe acute respiratory syndrome coronavirus 2
GLVAEWFLA

SEQ ID NO: 5685 - protein, 10 aa, Severe acute respiratory syndrome coronavirus 2
GLVAEWFLAY

SEQ ID NO: 5686 - protein, 9 aa, Severe acute respiratory syndrome coronavirus 2
LVAEWFLAY

SEQ ID NO: 5687 - protein, 10 aa, Severe acute respiratory syndrome coronavirus 2
LVAEWFLAYI

SEQ ID NO: 5688 - protein, 9 aa, Severe acute respiratory syndrome coronavirus 2
AEWFLAYIL

SEQ ID NO: 5689 - protein, 10 aa, Severe acute respiratory syndrome coronavirus 2
AEWFLAYILF

SEQ ID NO: 5690 - protein, 9 aa, Severe acute respiratory syndrome coronavirus 2
EWFLAYILF

SEQ ID NO: 5691 - protein, 10 aa, Severe acute respiratory syndrome coronavirus 2
EWFLAYILFT

SEQ ID NO: 5692 - protein, 10 aa, Severe acute respiratory syndrome coronavirus 2
WFLAYILFTR

SEQ ID NO: 5693 - protein, 9 aa, Severe acute respiratory syndrome coronavirus 2
FLAYILFTR

SEQ ID NO: 5694 - protein, 10 aa, Severe acute respiratory syndrome coronavirus 2
FLAYILFTRF

SEQ ID NO: 5695 - protein, 10 aa, Severe acute respiratory syndrome coronavirus 2
LAYILFTRFF

SEQ ID NO: 5696 - protein, 10 aa, Severe acute respiratory syndrome coronavirus 2
AYILFTRFFY

SEQ ID NO: 5697 - protein, 9 aa, Severe acute respiratory syndrome coronavirus 2
YILFTRFFY

SEQ ID NO: 5698 - protein, 10 aa, Severe acute respiratory syndrome coronavirus 2
YILFTRFFYV

SEQ ID NO: 5699 - protein, 9 aa, Severe acute respiratory syndrome coronavirus 2
ILFTRFFYV

SEQ ID NO: 5700 - protein, 10 aa, Severe acute respiratory syndrome coronavirus 2
ILFTRFFYVL

SEQ ID NO: 5701 - protein, 9 aa, Severe acute respiratory syndrome coronavirus 2
LFTRFFYVL

SEQ ID NO: 5702 - protein, 10 aa, Severe acute respiratory syndrome coronavirus 2
FTRFFYVLGL

SEQ ID NO: 5703 - protein, 10 aa, Severe acute respiratory syndrome coronavirus 2
RFFYVLGLAA

SEQ ID NO: 5704 - protein, 10 aa, Severe acute respiratory syndrome coronavirus 2
FFYVLGLAAI

SEQ ID NO: 5705 - protein, 9 aa, Severe acute respiratory syndrome coronavirus 2
FYVLGLAAI

SEQ ID NO: 5706 - protein, 10 aa, Severe acute respiratory syndrome coronavirus 2
FYVLGLAAIM

SEQ ID NO: 5707 - protein, 9 aa, Severe acute respiratory syndrome coronavirus 2
YVLGLAAIM

SEQ ID NO: 5708 - protein, 10 aa, Severe acute respiratory syndrome coronavirus 2
VLGLAAIMQL

SEQ ID NO: 5709 - protein, 9 aa, Severe acute respiratory syndrome coronavirus 2
GLAAIMQLF

SEQ ID NO: 5710 - protein, 10 aa, Severe acute respiratory syndrome coronavirus 2
GLAAIMQLFF

SEQ ID NO: 5711 - protein, 9 aa, Severe acute respiratory syndrome coronavirus 2
LAAIMQLFF

SEQ ID NO: 5712 - protein, 10 aa, Severe acute respiratory syndrome coronavirus 2
AAIMQLFFSY

SEQ ID NO: 5713 - protein, 9 aa, Severe acute respiratory syndrome coronavirus 2
AIMQLFFSY

SEQ ID NO: 5714 - protein, 10 aa, Severe acute respiratory syndrome coronavirus 2
AIMQLFFSYF

SEQ ID NO: 5715 - protein, 9 aa, Severe acute respiratory syndrome coronavirus 2
IMQLFFSYF

SEQ ID NO: 5716 - protein, 10 aa, Severe acute respiratory syndrome coronavirus 2
IMQLFFSYFA

SEQ ID NO: 5717 - protein, 9 aa, Severe acute respiratory syndrome coronavirus 2
MQLFFSYFA

SEQ ID NO: 5718 - protein, 10 aa, Severe acute respiratory syndrome coronavirus 2
MQLFFSYFAV

SEQ ID NO: 5719 - protein, 9 aa, Severe acute respiratory syndrome coronavirus 2
QLFFSYFAV

SEQ ID NO: 5720 - protein, 10 aa, Severe acute respiratory syndrome coronavirus 2
LFFSYFAVHF

SEQ ID NO: 5721 - protein, 9 aa, Severe acute respiratory syndrome coronavirus 2
FFSYFAVHF

SEQ ID NO: 5722 - protein, 10 aa, Severe acute respiratory syndrome coronavirus 2
FFSYFAVHFI

SEQ ID NO: 5723 - protein, 9 aa, Severe acute respiratory syndrome coronavirus 2
FSYFAVHFI

SEQ ID NO: 5724 - protein, 9 aa, Severe acute respiratory syndrome coronavirus 2
SYFAVHFIS

SEQ ID NO: 5725 - protein, 10 aa, Severe acute respiratory syndrome coronavirus 2
SYFAVHFISN

SEQ ID NO: 5726 - protein, 10 aa, Severe acute respiratory syndrome coronavirus 2
FAVHFISNSW

SEQ ID NO: 5727 - protein, 9 aa, Severe acute respiratory syndrome coronavirus 2
AVHFISNSW

SEQ ID NO: 5728 - protein, 10 aa, Severe acute respiratory syndrome coronavirus 2
AVHFISNSWL

SEQ ID NO: 5729 - protein, 9 aa, Severe acute respiratory syndrome coronavirus 2
HFISNSWLM

SEQ ID NO: 5730 - protein, 10 aa, Severe acute respiratory syndrome coronavirus 2
HFISNSWLMW

SEQ ID NO: 5731 - protein, 9 aa, Severe acute respiratory syndrome coronavirus 2
FISNSWLMW

SEQ ID NO: 5732 - protein, 10 aa, Severe acute respiratory syndrome coronavirus 2
FISNSWLMWL

SEQ ID NO: 5733 - protein, 9 aa, Severe acute respiratory syndrome coronavirus 2
ISNSWLMWL

SEQ ID NO: 5734 - protein, 10 aa, Severe acute respiratory syndrome coronavirus 2
ISNSWLMWLI

SEQ ID NO: 5735 - protein, 9 aa, Severe acute respiratory syndrome coronavirus 2
SNSWLMWLI

SEQ ID NO: 5736 - protein, 10 aa, Severe acute respiratory syndrome coronavirus 2
SNSWLMWLII

SEQ ID NO: 5737 - protein, 9 aa, Severe acute respiratory syndrome coronavirus 2
NSWLMWLII

SEQ ID NO: 5738 - protein, 10 aa, Severe acute respiratory syndrome coronavirus 2
SWLMWLIINL

SEQ ID NO: 5739 - protein, 9 aa, Severe acute respiratory syndrome coronavirus 2
WLMWLIINL

SEQ ID NO: 5740 - protein, 10 aa, Severe acute respiratory syndrome coronavirus 2
WLMWLIINLV

SEQ ID NO: 5741 - protein, 9 aa, Severe acute respiratory syndrome coronavirus 2
LMWLIINLV

SEQ ID NO: 5742 - protein, 10 aa, Severe acute respiratory syndrome coronavirus 2
LMWLIINLVQ

SEQ ID NO: 5743 - protein, 10 aa, Severe acute respiratory syndrome coronavirus 2
MWLIINLVQM

SEQ ID NO: 5744 - protein, 9 aa, Severe acute respiratory syndrome coronavirus 2
WLIINLVQM

SEQ ID NO: 5745 - protein, 10 aa, Severe acute respiratory syndrome coronavirus 2
WLIINLVQMA

SEQ ID NO: 5746 - protein, 9 aa, Severe acute respiratory syndrome coronavirus 2
LIINLVQMA

SEQ ID NO: 5747 - protein, 10 aa, Severe acute respiratory syndrome coronavirus 2
NLVQMAPISA

SEQ ID NO: 5748 - protein, 9 aa, Severe acute respiratory syndrome coronavirus 2
LVQMAPISA

SEQ ID NO: 5749 - protein, 10 aa, Severe acute respiratory syndrome coronavirus 2
LVQMAPISAM

SEQ ID NO: 5750 - protein, 9 aa, Severe acute respiratory syndrome coronavirus 2
VQMAPISAM

SEQ ID NO: 5751 - protein, 10 aa, Severe acute respiratory syndrome coronavirus 2
VQMAPISAMV

SEQ ID NO: 5752 - protein, 9 aa, Severe acute respiratory syndrome coronavirus 2
QMAPISAMV

SEQ ID NO: 5753 - protein, 9 aa, Severe acute respiratory syndrome coronavirus 2
APISAMVRM

SEQ ID NO: 5754 - protein, 10 aa, Severe acute respiratory syndrome coronavirus 2
APISAMVRMY

SEQ ID NO: 5755 - protein, 9 aa, Severe acute respiratory syndrome coronavirus 2
PISAMVRMY

SEQ ID NO: 5756 - protein, 10 aa, Severe acute respiratory syndrome coronavirus 2
PISAMVRMYI

SEQ ID NO: 5757 - protein, 9 aa, Severe acute respiratory syndrome coronavirus 2
ISAMVRMYI

SEQ ID NO: 5758 - protein, 10 aa, Severe acute respiratory syndrome coronavirus 2
ISAMVRMYIF

SEQ ID NO: 5759 - protein, 9 aa, Severe acute respiratory syndrome coronavirus 2
SAMVRMYIF

SEQ ID NO: 5760 - protein, 10 aa, Severe acute respiratory syndrome coronavirus 2
SAMVRMYIFF

SEQ ID NO: 5761 - protein, 9 aa, Severe acute respiratory syndrome coronavirus 2
AMVRMYIFF

SEQ ID NO: 5762 - protein, 10 aa, Severe acute respiratory syndrome coronavirus 2
AMVRMYIFFA

SEQ ID NO: 5763 - protein, 9 aa, Severe acute respiratory syndrome coronavirus 2
MVRMYIFFA

SEQ ID NO: 5764 - protein, 10 aa, Severe acute respiratory syndrome coronavirus 2
VRMYIFFASF

SEQ ID NO: 5765 - protein, 9 aa, Severe acute respiratory syndrome coronavirus 2
RMYIFFASF

SEQ ID NO: 5766 - protein, 10 aa, Severe acute respiratory syndrome coronavirus 2
RMYIFFASFY

SEQ ID NO: 5767 - protein, 9 aa, Severe acute respiratory syndrome coronavirus 2
MYIFFASFY

SEQ ID NO: 5768 - protein, 10 aa, Severe acute respiratory syndrome coronavirus 2
MYIFFASFYY

SEQ ID NO: 5769 - protein, 9 aa, Severe acute respiratory syndrome coronavirus 2
YIFFASFYY

SEQ ID NO: 5770 - protein, 10 aa, Severe acute respiratory syndrome coronavirus 2
YIFFASFYYV

SEQ ID NO: 5771 - protein, 9 aa, Severe acute respiratory syndrome coronavirus 2
IFFASFYYV

SEQ ID NO: 5772 - protein, 10 aa, Severe acute respiratory syndrome coronavirus 2
IFFASFYYVW

SEQ ID NO: 5773 - protein, 9 aa, Severe acute respiratory syndrome coronavirus 2
FFASFYYVW

SEQ ID NO: 5774 - protein, 10 aa, Severe acute respiratory syndrome coronavirus 2
FFASFYYVWK

SEQ ID NO: 5775 - protein, 10 aa, Severe acute respiratory syndrome coronavirus 2
ASFYYVWKSY

SEQ ID NO: 5776 - protein, 10 aa, Severe acute respiratory syndrome coronavirus 2
SFYYVWKSYV

SEQ ID NO: 5777 - protein, 9 aa, Severe acute respiratory syndrome coronavirus 2
FYYVWKSYV

SEQ ID NO: 5778 - protein, 10 aa, Severe acute respiratory syndrome coronavirus 2
FYYVWKSYVH

SEQ ID NO: 5779 - protein, 9 aa, Severe acute respiratory syndrome coronavirus 2
YYVWKSYVH

SEQ ID NO: 5780 - protein, 10 aa, Severe acute respiratory syndrome coronavirus 2
YYVWKSYVHV

SEQ ID NO: 5781 - protein, 9 aa, Severe acute respiratory syndrome coronavirus 2
YVWKSYVHV

SEQ ID NO: 5782 - protein, 10 aa, Severe acute respiratory syndrome coronavirus 2
YVWKSYVHVV

SEQ ID NO: 5783 - protein, 9 aa, Severe acute respiratory syndrome coronavirus 2
VWKSYVHVV

SEQ ID NO: 5784 - protein, 10 aa, Severe acute respiratory syndrome coronavirus 2
VWKSYVHVVD

SEQ ID NO: 5785 - protein, 10 aa, Severe acute respiratory syndrome coronavirus 2
SYVHVVDGCN

SEQ ID NO: 5786 - protein, 10 aa, Severe acute respiratory syndrome coronavirus 2
HVVDGCNSST

SEQ ID NO: 5787 - protein, 9 aa, Severe acute respiratory syndrome coronavirus 2
VVDGCNSST

SEQ ID NO: 5788 - protein, 10 aa, Severe acute respiratory syndrome coronavirus 2
CNSSTCMMCY

SEQ ID NO: 5789 - protein, 9 aa, Severe acute respiratory syndrome coronavirus 2
NSSTCMMCY

SEQ ID NO: 5790 - protein, 10 aa, Severe acute respiratory syndrome coronavirus 2
NSSTCMMCYK

SEQ ID NO: 5791 - protein, 9 aa, Severe acute respiratory syndrome coronavirus 2
SSTCMMCYK

SEQ ID NO: 5792 - protein, 10 aa, Severe acute respiratory syndrome coronavirus 2
SSTCMMCYKR

SEQ ID NO: 5793 - protein, 9 aa, Severe acute respiratory syndrome coronavirus 2
STCMMCYKR

SEQ ID NO: 5794 - protein, 9 aa, Severe acute respiratory syndrome coronavirus 2
CMMCYKRNR

SEQ ID NO: 5795 - protein, 9 aa, Severe acute respiratory syndrome coronavirus 2
CYKRNRATR

SEQ ID NO: 5796 - protein, 9 aa, Severe acute respiratory syndrome coronavirus 2
YKRNRATRV

SEQ ID NO: 5797 - protein, 10 aa, Severe acute respiratory syndrome coronavirus 2
RATRVECTTI

SEQ ID NO: 5798 - protein, 9 aa, Severe acute respiratory syndrome coronavirus 2
CTTIVNGVR

SEQ ID NO: 5799 - protein, 9 aa, Severe acute respiratory syndrome coronavirus 2
TTIVNGVRR

SEQ ID NO: 5800 - protein, 10 aa, Severe acute respiratory syndrome coronavirus 2
TIVNGVRRSF

SEQ ID NO: 5801 - protein, 10 aa, Severe acute respiratory syndrome coronavirus 2
IVNGVRRSFY

SEQ ID NO: 5802 - protein, 9 aa, Severe acute respiratory syndrome coronavirus 2
GVRRSFYVY

SEQ ID NO: 5803 - protein, 10 aa, Severe acute respiratory syndrome coronavirus 2
SFYVYANGGK

SEQ ID NO: 5804 - protein, 9 aa, Severe acute respiratory syndrome coronavirus 2
VYANGGKGF

SEQ ID NO: 5805 - protein, 10 aa, Severe acute respiratory syndrome coronavirus 2
YANGGKGFCK

SEQ ID NO: 5806 - protein, 10 aa, Severe acute respiratory syndrome coronavirus 2
GKGFCKLHNW

SEQ ID NO: 5807 - protein, 10 aa, Severe acute respiratory syndrome coronavirus 2
KLHNWNCVNC

SEQ ID NO: 5808 - protein, 10 aa, Severe acute respiratory syndrome coronavirus 2
NWNCVNCDTF

SEQ ID NO: 5809 - protein, 9 aa, Severe acute respiratory syndrome coronavirus 2
CVNCDTFCA

SEQ ID NO: 5810 - protein, 9 aa, Severe acute respiratory syndrome coronavirus 2
NCDTFCAGS

SEQ ID NO: 5811 - protein, 10 aa, Severe acute respiratory syndrome coronavirus 2
CDTFCAGSTF

SEQ ID NO: 5812 - protein, 9 aa, Severe acute respiratory syndrome coronavirus 2
DTFCAGSTF

SEQ ID NO: 5813 - protein, 10 aa, Severe acute respiratory syndrome coronavirus 2
DTFCAGSTFI

SEQ ID NO: 5814 - protein, 9 aa, Severe acute respiratory syndrome coronavirus 2
GSTFISDEV

SEQ ID NO: 5815 - protein, 9 aa, Severe acute respiratory syndrome coronavirus 2
ISDEVARDL

SEQ ID NO: 5816 - protein, 10 aa, Severe acute respiratory syndrome coronavirus 2
ISDEVARDLS

SEQ ID NO: 5817 - protein, 10 aa, Severe acute respiratory syndrome coronavirus 2
SDEVARDLSL

SEQ ID NO: 5818 - protein, 9 aa, Severe acute respiratory syndrome coronavirus 2
DEVARDLSL

SEQ ID NO: 5819 - protein, 10 aa, Severe acute respiratory syndrome coronavirus 2
DEVARDLSLQ

SEQ ID NO: 5820 - protein, 9 aa, Severe acute respiratory syndrome coronavirus 2
VARDLSLQF

SEQ ID NO: 5821 - protein, 10 aa, Severe acute respiratory syndrome coronavirus 2
VARDLSLQFK

SEQ ID NO: 5822 - protein, 9 aa, Severe acute respiratory syndrome coronavirus 2
RPINPTDQS

SEQ ID NO: 5823 - protein, 10 aa, Severe acute respiratory syndrome coronavirus 2
RPINPTDQSS

SEQ ID NO: 5824 - protein, 10 aa, Severe acute respiratory syndrome coronavirus 2
PINPTDQSSY

SEQ ID NO: 5825 - protein, 9 aa, Severe acute respiratory syndrome coronavirus 2
NPTDQSSYI

SEQ ID NO: 5826 - protein, 10 aa, Severe acute respiratory syndrome coronavirus 2
NPTDQSSYIV

SEQ ID NO: 5827 - protein, 9 aa, Severe acute respiratory syndrome coronavirus 2
PTDQSSYIV

SEQ ID NO: 5828 - protein, 10 aa, Severe acute respiratory syndrome coronavirus 2
PTDQSSYIVD

SEQ ID NO: 5829 - protein, 9 aa, Severe acute respiratory syndrome coronavirus 2
QSSYIVDSV

SEQ ID NO: 5830 - protein, 10 aa, Severe acute respiratory syndrome coronavirus 2
SSYIVDSVTV

SEQ ID NO: 5831 - protein, 9 aa, Severe acute respiratory syndrome coronavirus 2
SYIVDSVTV

SEQ ID NO: 5832 - protein, 9 aa, Severe acute respiratory syndrome coronavirus 2
YIVDSVTVK

SEQ ID NO: 5833 - protein, 9 aa, Severe acute respiratory syndrome coronavirus 2
VTVKNGSIH

SEQ ID NO: 5834 - protein, 10 aa, Severe acute respiratory syndrome coronavirus 2
TVKNGSIHLY

SEQ ID NO: 5835 - protein, 9 aa, Severe acute respiratory syndrome coronavirus 2
VKNGSIHLY

SEQ ID NO: 5836 - protein, 10 aa, Severe acute respiratory syndrome coronavirus 2
VKNGSIHLYF

SEQ ID NO: 5837 - protein, 9 aa, Severe acute respiratory syndrome coronavirus 2
KNGSIHLYF

SEQ ID NO: 5838 - protein, 9 aa, Severe acute respiratory syndrome coronavirus 2
GSIHLYFDK

SEQ ID NO: 5839 - protein, 10 aa, Severe acute respiratory syndrome coronavirus 2
HLYFDKAGQK

SEQ ID NO: 5840 - protein, 9 aa, Severe acute respiratory syndrome coronavirus 2
LYFDKAGQK

SEQ ID NO: 5841 - protein, 10 aa, Severe acute respiratory syndrome coronavirus 2
YFDKAGQKTY

SEQ ID NO: 5842 - protein, 9 aa, Severe acute respiratory syndrome coronavirus 2
KTYERHSLS

SEQ ID NO: 5843 - protein, 10 aa, Severe acute respiratory syndrome coronavirus 2
KTYERHSLSH

SEQ ID NO: 5844 - protein, 10 aa, Severe acute respiratory syndrome coronavirus 2
TYERHSLSHF

SEQ ID NO: 5845 - protein, 9 aa, Severe acute respiratory syndrome coronavirus 2
YERHSLSHF

SEQ ID NO: 5846 - protein, 9 aa, Severe acute respiratory syndrome coronavirus 2
HSLSHFVNL

SEQ ID NO: 5847 - protein, 10 aa, Severe acute respiratory syndrome coronavirus 2
SLSHFVNLDN

SEQ ID NO: 5848 - protein, 10 aa, Severe acute respiratory syndrome coronavirus 2
LSHFVNLDNL

SEQ ID NO: 5849 - protein, 10 aa, Severe acute respiratory syndrome coronavirus 2
NLDNLRANNT

SEQ ID NO: 5850 - protein, 9 aa, Severe acute respiratory syndrome coronavirus 2
RANNTKGSL

SEQ ID NO: 5851 - protein, 10 aa, Severe acute respiratory syndrome coronavirus 2
GSLPINVIVF

SEQ ID NO: 5852 - protein, 9 aa, Severe acute respiratory syndrome coronavirus 2
SLPINVIVF

SEQ ID NO: 5853 - protein, 10 aa, Severe acute respiratory syndrome coronavirus 2
LPINVIVFDG

SEQ ID NO: 5854 - protein, 10 aa, Severe acute respiratory syndrome coronavirus 2
PINVIVFDGK

SEQ ID NO: 5855 - protein, 10 aa, Severe acute respiratory syndrome coronavirus 2
NVIVFDGKSK

SEQ ID NO: 5856 - protein, 9 aa, Severe acute respiratory syndrome coronavirus 2
VIVFDGKSK

SEQ ID NO: 5857 - protein, 10 aa, Severe acute respiratory syndrome coronavirus 2
KSKCEESSAK

SEQ ID NO: 5858 - protein, 9 aa, Severe acute respiratory syndrome coronavirus 2
SKCEESSAK

SEQ ID NO: 5859 - protein, 9 aa, Severe acute respiratory syndrome coronavirus 2
CEESSAKSA

SEQ ID NO: 5860 - protein, 9 aa, Severe acute respiratory syndrome coronavirus 2
ESSAKSASV

SEQ ID NO: 5861 - protein, 10 aa, Severe acute respiratory syndrome coronavirus 2
ESSAKSASVY

SEQ ID NO: 5862 - protein, 9 aa, Severe acute respiratory syndrome coronavirus 2
SSAKSASVY

SEQ ID NO: 5863 - protein, 10 aa, Severe acute respiratory syndrome coronavirus 2
SSAKSASVYY

SEQ ID NO: 5864 - protein, 10 aa, Severe acute respiratory syndrome coronavirus 2
KSASVYYSQL

SEQ ID NO: 5865 - protein, 9 aa, Severe acute respiratory syndrome coronavirus 2
SVYYSQLMC

SEQ ID NO: 5866 - protein, 10 aa, Severe acute respiratory syndrome coronavirus 2
SVYYSQLMCQ

SEQ ID NO: 5867 - protein, 9 aa, Severe acute respiratory syndrome coronavirus 2
YYSQLMCQP

SEQ ID NO: 5868 - protein, 10 aa, Severe acute respiratory syndrome coronavirus 2
YYSQLMCQPI

SEQ ID NO: 5869 - protein, 9 aa, Severe acute respiratory syndrome coronavirus 2
YSQLMCQPI

SEQ ID NO: 5870 - protein, 10 aa, Severe acute respiratory syndrome coronavirus 2
YSQLMCQPIL

SEQ ID NO: 5871 - protein, 9 aa, Severe acute respiratory syndrome coronavirus 2
SQLMCQPIL

SEQ ID NO: 5872 - protein, 10 aa, Severe acute respiratory syndrome coronavirus 2
SQLMCQPILL

SEQ ID NO: 5873 - protein, 9 aa, Severe acute respiratory syndrome coronavirus 2
QLMCQPILL

SEQ ID NO: 5874 - protein, 10 aa, Severe acute respiratory syndrome coronavirus 2
QLMCQPILLL

SEQ ID NO: 5875 - protein, 9 aa, Severe acute respiratory syndrome coronavirus 2
LMCQPILLL

SEQ ID NO: 5876 - protein, 10 aa, Severe acute respiratory syndrome coronavirus 2
LMCQPILLLD

SEQ ID NO: 5877 - protein, 10 aa, Severe acute respiratory syndrome coronavirus 2
QPILLLDQAL

SEQ ID NO: 5878 - protein, 10 aa, Severe acute respiratory syndrome coronavirus 2
LLLDQALVSD

SEQ ID NO: 5879 - protein, 10 aa, Severe acute respiratory syndrome coronavirus 2
LLDQALVSDV

SEQ ID NO: 5880 - protein, 10 aa, Severe acute respiratory syndrome coronavirus 2
ALVSDVGDSA

SEQ ID NO: 5881 - protein, 9 aa, Severe acute respiratory syndrome coronavirus 2
LVSDVGDSA

SEQ ID NO: 5882 - protein, 9 aa, Severe acute respiratory syndrome coronavirus 2
VSDVGDSAE

SEQ ID NO: 5883 - protein, 10 aa, Severe acute respiratory syndrome coronavirus 2
VSDVGDSAEV

SEQ ID NO: 5884 - protein, 10 aa, Severe acute respiratory syndrome coronavirus 2
SAEVAVKMFD

SEQ ID NO: 5885 - protein, 10 aa, Severe acute respiratory syndrome coronavirus 2
AEVAVKMFDA

SEQ ID NO: 5886 - protein, 10 aa, Severe acute respiratory syndrome coronavirus 2
EVAVKMFDAY

SEQ ID NO: 5887 - protein, 9 aa, Severe acute respiratory syndrome coronavirus 2
AVKMFDAYV

SEQ ID NO: 5888 - protein, 9 aa, Severe acute respiratory syndrome coronavirus 2
KMFDAYVNT

SEQ ID NO: 5889 - protein, 10 aa, Severe acute respiratory syndrome coronavirus 2
KMFDAYVNTF

SEQ ID NO: 5890 - protein, 9 aa, Severe acute respiratory syndrome coronavirus 2
MFDAYVNTF

SEQ ID NO: 5891 - protein, 10 aa, Severe acute respiratory syndrome coronavirus 2
MFDAYVNTFS

SEQ ID NO: 5892 - protein, 10 aa, Severe acute respiratory syndrome coronavirus 2
AYVNTFSSTF

SEQ ID NO: 5893 - protein, 10 aa, Severe acute respiratory syndrome coronavirus 2
YVNTFSSTFN

SEQ ID NO: 5894 - protein, 9 aa, Severe acute respiratory syndrome coronavirus 2
NTFSSTFNV

SEQ ID NO: 5895 - protein, 10 aa, Severe acute respiratory syndrome coronavirus 2
TFSSTFNVPM

SEQ ID NO: 5896 - protein, 9 aa, Severe acute respiratory syndrome coronavirus 2
FSSTFNVPM

SEQ ID NO: 5897 - protein, 10 aa, Severe acute respiratory syndrome coronavirus 2
SSTFNVPMEK

SEQ ID NO: 5898 - protein, 9 aa, Severe acute respiratory syndrome coronavirus 2
STFNVPMEK

SEQ ID NO: 5899 - protein, 9 aa, Severe acute respiratory syndrome coronavirus 2
TFNVPMEKL

SEQ ID NO: 5900 - protein, 10 aa, Severe acute respiratory syndrome coronavirus 2
VPMEKLKTLV

SEQ ID NO: 5901 - protein, 9 aa, Severe acute respiratory syndrome coronavirus 2
MEKLKTLVA

SEQ ID NO: 5902 - protein, 10 aa, Severe acute respiratory syndrome coronavirus 2
TLVATAEAEL

SEQ ID NO: 5903 - protein, 9 aa, Severe acute respiratory syndrome coronavirus 2
LVATAEAEL

SEQ ID NO: 5904 - protein, 9 aa, Severe acute respiratory syndrome coronavirus 2
ATAEAELAK

SEQ ID NO: 5905 - protein, 10 aa, Severe acute respiratory syndrome coronavirus 2
VSLDNVLSTF

SEQ ID NO: 5906 - protein, 9 aa, Severe acute respiratory syndrome coronavirus 2
SLDNVLSTF

SEQ ID NO: 5907 - protein, 10 aa, Severe acute respiratory syndrome coronavirus 2
SLDNVLSTFI

SEQ ID NO: 5908 - protein, 9 aa, Severe acute respiratory syndrome coronavirus 2
LDNVLSTFI

SEQ ID NO: 5909 - protein, 9 aa, Severe acute respiratory syndrome coronavirus 2
NVLSTFISA

SEQ ID NO: 5910 - protein, 10 aa, Severe acute respiratory syndrome coronavirus 2
VLSTFISAAR

SEQ ID NO: 5911 - protein, 10 aa, Severe acute respiratory syndrome coronavirus 2
TFISAARQGF

SEQ ID NO: 5912 - protein, 10 aa, Severe acute respiratory syndrome coronavirus 2
FISAARQGFV

SEQ ID NO: 5913 - protein, 9 aa, Severe acute respiratory syndrome coronavirus 2
ISAARQGFV

SEQ ID NO: 5914 - protein, 10 aa, Severe acute respiratory syndrome coronavirus 2
FVDSDVETKD

SEQ ID NO: 5915 - protein, 9 aa, Severe acute respiratory syndrome coronavirus 2
DSDVETKDV

SEQ ID NO: 5916 - protein, 10 aa, Severe acute respiratory syndrome coronavirus 2
DSDVETKDVV

SEQ ID NO: 5917 - protein, 9 aa, Severe acute respiratory syndrome coronavirus 2
VETKDVVEC

SEQ ID NO: 5918 - protein, 10 aa, Severe acute respiratory syndrome coronavirus 2
VETKDVVECL

SEQ ID NO: 5919 - protein, 10 aa, Severe acute respiratory syndrome coronavirus 2
ETKDVVECLK

SEQ ID NO: 5920 - protein, 9 aa, Severe acute respiratory syndrome coronavirus 2
KDVVECLKL

SEQ ID NO: 5921 - protein, 10 aa, Severe acute respiratory syndrome coronavirus 2
VVECLKLSHQ

SEQ ID NO: 5922 - protein, 10 aa, Severe acute respiratory syndrome coronavirus 2
VECLKLSHQS

SEQ ID NO: 5923 - protein, 10 aa, Severe acute respiratory syndrome coronavirus 2
KLSHQSDIEV

SEQ ID NO: 5924 - protein, 9 aa, Severe acute respiratory syndrome coronavirus 2
QSDIEVTGD

SEQ ID NO: 5925 - protein, 10 aa, Severe acute respiratory syndrome coronavirus 2
QSDIEVTGDS

SEQ ID NO: 5926 - protein, 10 aa, Severe acute respiratory syndrome coronavirus 2
EVTGDSCNNY

SEQ ID NO: 5927 - protein, 9 aa, Severe acute respiratory syndrome coronavirus 2
VTGDSCNNY

SEQ ID NO: 5928 - protein, 10 aa, Severe acute respiratory syndrome coronavirus 2
TGDSCNNYML

SEQ ID NO: 5929 - protein, 9 aa, Severe acute respiratory syndrome coronavirus 2
GDSCNNYML

SEQ ID NO: 5930 - protein, 9 aa, Severe acute respiratory syndrome coronavirus 2
DSCNNYMLT

SEQ ID NO: 5931 - protein, 10 aa, Severe acute respiratory syndrome coronavirus 2
DSCNNYMLTY

SEQ ID NO: 5932 - protein, 9 aa, Severe acute respiratory syndrome coronavirus 2
SCNNYMLTY

SEQ ID NO: 5933 - protein, 10 aa, Severe acute respiratory syndrome coronavirus 2
CNNYMLTYNK

SEQ ID NO: 5934 - protein, 9 aa, Severe acute respiratory syndrome coronavirus 2
NYMLTYNKV

SEQ ID NO: 5935 - protein, 10 aa, Severe acute respiratory syndrome coronavirus 2
NYMLTYNKVE

SEQ ID NO: 5936 - protein, 10 aa, Severe acute respiratory syndrome coronavirus 2
TYNKVENMTP

SEQ ID NO: 5937 - protein, 9 aa, Severe acute respiratory syndrome coronavirus 2
VENMTPRDL

SEQ ID NO: 5938 - protein, 10 aa, Severe acute respiratory syndrome coronavirus 2
TPRDLGACID

SEQ ID NO: 5939 - protein, 10 aa, Severe acute respiratory syndrome coronavirus 2
DLGACIDCSA

SEQ ID NO: 5940 - protein, 10 aa, Severe acute respiratory syndrome coronavirus 2
ACIDCSARHI

SEQ ID NO: 5941 - protein, 9 aa, Severe acute respiratory syndrome coronavirus 2
SARHINAQV

SEQ ID NO: 5942 - protein, 9 aa, Severe acute respiratory syndrome coronavirus 2
VAKSHNIAL

SEQ ID NO: 5943 - protein, 10 aa, Severe acute respiratory syndrome coronavirus 2
AKSHNIALIW

SEQ ID NO: 5944 - protein, 9 aa, Severe acute respiratory syndrome coronavirus 2
KSHNIALIW

SEQ ID NO: 5945 - protein, 9 aa, Severe acute respiratory syndrome coronavirus 2
HNIALIWNV

SEQ ID NO: 5946 - protein, 9 aa, Severe acute respiratory syndrome coronavirus 2
ALIWNVKDF

SEQ ID NO: 5947 - protein, 10 aa, Severe acute respiratory syndrome coronavirus 2
ALIWNVKDFM

SEQ ID NO: 5948 - protein, 9 aa, Severe acute respiratory syndrome coronavirus 2
IWNVKDFMS

SEQ ID NO: 5949 - protein, 10 aa, Severe acute respiratory syndrome coronavirus 2
IWNVKDFMSL

SEQ ID NO: 5950 - protein, 10 aa, Severe acute respiratory syndrome coronavirus 2
NVKDFMSLSE

SEQ ID NO: 5951 - protein, 9 aa, Severe acute respiratory syndrome coronavirus 2
DFMSLSEQL

SEQ ID NO: 5952 - protein, 10 aa, Severe acute respiratory syndrome coronavirus 2
FMSLSEQLRK

SEQ ID NO: 5953 - protein, 9 aa, Severe acute respiratory syndrome coronavirus 2
MSLSEQLRK

SEQ ID NO: 5954 - protein, 10 aa, Severe acute respiratory syndrome coronavirus 2
LSEQLRKQIR

SEQ ID NO: 5955 - protein, 9 aa, Severe acute respiratory syndrome coronavirus 2
KQIRSAAKK

SEQ ID NO: 5956 - protein, 10 aa, Severe acute respiratory syndrome coronavirus 2
SAAKKNNLPF

SEQ ID NO: 5957 - protein, 10 aa, Severe acute respiratory syndrome coronavirus 2
AAKKNNLPFK

SEQ ID NO: 5958 - protein, 9 aa, Severe acute respiratory syndrome coronavirus 2
AKKNNLPFK

SEQ ID NO: 5959 - protein, 9 aa, Severe acute respiratory syndrome coronavirus 2
NLPFKLTCA

SEQ ID NO: 5960 - protein, 10 aa, Severe acute respiratory syndrome coronavirus 2
NLPFKLTCAT

SEQ ID NO: 5961 - protein, 9 aa, Severe acute respiratory syndrome coronavirus 2
LPFKLTCAT

SEQ ID NO: 5962 - protein, 10 aa, Severe acute respiratory syndrome coronavirus 2
LPFKLTCATT

SEQ ID NO: 5963 - protein, 10 aa, Severe acute respiratory syndrome coronavirus 2
PFKLTCATTR

SEQ ID NO: 5964 - protein, 10 aa, Severe acute respiratory syndrome coronavirus 2
KLTCATTRQV

SEQ ID NO: 5965 - protein, 9 aa, Severe acute respiratory syndrome coronavirus 2
LTCATTRQV

SEQ ID NO: 5966 - protein, 10 aa, Severe acute respiratory syndrome coronavirus 2
RQVVNVVTTK

SEQ ID NO: 5967 - protein, 9 aa, Severe acute respiratory syndrome coronavirus 2
QVVNVVTTK

SEQ ID NO: 5968 - protein, 9 aa, Severe acute respiratory syndrome coronavirus 2
NVVTTKIAL

SEQ ID NO: 5969 - protein, 10 aa, Severe acute respiratory syndrome coronavirus 2
NVVTTKIALK

SEQ ID NO: 5970 - protein, 9 aa, Severe acute respiratory syndrome coronavirus 2
IVNNWLKQL

SEQ ID NO: 5971 - protein, 10 aa, Severe acute respiratory syndrome coronavirus 2
WLKQLIKVTL

SEQ ID NO: 5972 - protein, 9 aa, Severe acute respiratory syndrome coronavirus 2
KQLIKVTLV

SEQ ID NO: 5973 - protein, 10 aa, Severe acute respiratory syndrome coronavirus 2
KQLIKVTLVF

SEQ ID NO: 5974 - protein, 9 aa, Severe acute respiratory syndrome coronavirus 2
QLIKVTLVF

SEQ ID NO: 5975 - protein, 10 aa, Severe acute respiratory syndrome coronavirus 2
QLIKVTLVFL

SEQ ID NO: 5976 - protein, 10 aa, Severe acute respiratory syndrome coronavirus 2
LIKVTLVFLF

SEQ ID NO: 5977 - protein, 10 aa, Severe acute respiratory syndrome coronavirus 2
IKVTLVFLFV

SEQ ID NO: 5978 - protein, 10 aa, Severe acute respiratory syndrome coronavirus 2
KVTLVFLFVA

SEQ ID NO: 5979 - protein, 9 aa, Severe acute respiratory syndrome coronavirus 2
TLVFLFVAA

SEQ ID NO: 5980 - protein, 10 aa, Severe acute respiratory syndrome coronavirus 2
TLVFLFVAAI

SEQ ID NO: 5981 - protein, 10 aa, Severe acute respiratory syndrome coronavirus 2
LVFLFVAAIF

SEQ ID NO: 5982 - protein, 9 aa, Severe acute respiratory syndrome coronavirus 2
VFLFVAAIF

SEQ ID NO: 5983 - protein, 10 aa, Severe acute respiratory syndrome coronavirus 2
VFLFVAAIFY

SEQ ID NO: 5984 - protein, 9 aa, Severe acute respiratory syndrome coronavirus 2
FLFVAAIFY

SEQ ID NO: 5985 - protein, 10 aa, Severe acute respiratory syndrome coronavirus 2
FLFVAAIFYL

SEQ ID NO: 5986 - protein, 10 aa, Severe acute respiratory syndrome coronavirus 2
LFVAAIFYLI

SEQ ID NO: 5987 - protein, 9 aa, Severe acute respiratory syndrome coronavirus 2
FVAAIFYLI

SEQ ID NO: 5988 - protein, 10 aa, Severe acute respiratory syndrome coronavirus 2
AAIFYLITPV

SEQ ID NO: 5989 - protein, 9 aa, Severe acute respiratory syndrome coronavirus 2
AIFYLITPV

SEQ ID NO: 5990 - protein, 10 aa, Severe acute respiratory syndrome coronavirus 2
IFYLITPVHV

SEQ ID NO: 5991 - protein, 9 aa, Severe acute respiratory syndrome coronavirus 2
FYLITPVHV

SEQ ID NO: 5992 - protein, 10 aa, Severe acute respiratory syndrome coronavirus 2
FYLITPVHVM

SEQ ID NO: 5993 - protein, 9 aa, Severe acute respiratory syndrome coronavirus 2
YLITPVHVM

SEQ ID NO: 5994 - protein, 10 aa, Severe acute respiratory syndrome coronavirus 2
LITPVHVMSK

SEQ ID NO: 5995 - protein, 9 aa, Severe acute respiratory syndrome coronavirus 2
ITPVHVMSK

SEQ ID NO: 5996 - protein, 9 aa, Severe acute respiratory syndrome coronavirus 2
TPVHVMSKH

SEQ ID NO: 5997 - protein, 10 aa, Severe acute respiratory syndrome coronavirus 2
TPVHVMSKHT

SEQ ID NO: 5998 - protein, 9 aa, Severe acute respiratory syndrome coronavirus 2
HVMSKHTDF

SEQ ID NO: 5999 - protein, 9 aa, Severe acute respiratory syndrome coronavirus 2
HTDFSSEII

SEQ ID NO: 6000 - protein, 10 aa, Severe acute respiratory syndrome coronavirus 2
HTDFSSEIIG

SEQ ID NO: 6001 - protein, 9 aa, Severe acute respiratory syndrome coronavirus 2
FSSEIIGYK

SEQ ID NO: 6002 - protein, 10 aa, Severe acute respiratory syndrome coronavirus 2
FSSEIIGYKA

SEQ ID NO: 6003 - protein, 9 aa, Severe acute respiratory syndrome coronavirus 2
SSEIIGYKA

SEQ ID NO: 6004 - protein, 10 aa, Severe acute respiratory syndrome coronavirus 2
SSEIIGYKAI

SEQ ID NO: 6005 - protein, 9 aa, Severe acute respiratory syndrome coronavirus 2
SEIIGYKAI

SEQ ID NO: 6006 - protein, 10 aa, Severe acute respiratory syndrome coronavirus 2
SEIIGYKAID

SEQ ID NO: 6007 - protein, 10 aa, Severe acute respiratory syndrome coronavirus 2
RDIASTDTCF

SEQ ID NO: 6008 - protein, 10 aa, Severe acute respiratory syndrome coronavirus 2
ASTDTCFANK

SEQ ID NO: 6009 - protein, 9 aa, Severe acute respiratory syndrome coronavirus 2
STDTCFANK

SEQ ID NO: 6010 - protein, 10 aa, Severe acute respiratory syndrome coronavirus 2
STDTCFANKH

SEQ ID NO: 6011 - protein, 9 aa, Severe acute respiratory syndrome coronavirus 2
CFANKHADF

SEQ ID NO: 6012 - protein, 9 aa, Severe acute respiratory syndrome coronavirus 2
NKHADFDTW

SEQ ID NO: 6013 - protein, 9 aa, Severe acute respiratory syndrome coronavirus 2
KHADFDTWF

SEQ ID NO: 6014 - protein, 9 aa, Severe acute respiratory syndrome coronavirus 2
HADFDTWFS

SEQ ID NO: 6015 - protein, 10 aa, Severe acute respiratory syndrome coronavirus 2
HADFDTWFSQ

SEQ ID NO: 6016 - protein, 10 aa, Severe acute respiratory syndrome coronavirus 2
TWFSQRGGSY

SEQ ID NO: 6017 - protein, 9 aa, Severe acute respiratory syndrome coronavirus 2
WFSQRGGSY

SEQ ID NO: 6018 - protein, 9 aa, Severe acute respiratory syndrome coronavirus 2
RGGSYTNDK

SEQ ID NO: 6019 - protein, 9 aa, Severe acute respiratory syndrome coronavirus 2
YTNDKACPL

SEQ ID NO: 6020 - protein, 10 aa, Severe acute respiratory syndrome coronavirus 2
YTNDKACPLI

SEQ ID NO: 6021 - protein, 10 aa, Severe acute respiratory syndrome coronavirus 2
LIAAVITREV

SEQ ID NO: 6022 - protein, 9 aa, Severe acute respiratory syndrome coronavirus 2
IAAVITREV

SEQ ID NO: 6023 - protein, 10 aa, Severe acute respiratory syndrome coronavirus 2
VITREVGFVV

SEQ ID NO: 6024 - protein, 9 aa, Severe acute respiratory syndrome coronavirus 2
ITREVGFVV

SEQ ID NO: 6025 - protein, 9 aa, Severe acute respiratory syndrome coronavirus 2
REVGFVVPG

SEQ ID NO: 6026 - protein, 10 aa, Severe acute respiratory syndrome coronavirus 2
REVGFVVPGL

SEQ ID NO: 6027 - protein, 10 aa, Severe acute respiratory syndrome coronavirus 2
FVVPGLPGTI

SEQ ID NO: 6028 - protein, 9 aa, Severe acute respiratory syndrome coronavirus 2
VPGLPGTIL

SEQ ID NO: 6029 - protein, 9 aa, Severe acute respiratory syndrome coronavirus 2
GLPGTILRT

SEQ ID NO: 6030 - protein, 10 aa, Severe acute respiratory syndrome coronavirus 2
GLPGTILRTT

SEQ ID NO: 6031 - protein, 10 aa, Severe acute respiratory syndrome coronavirus 2
LPGTILRTTN

SEQ ID NO: 6032 - protein, 9 aa, Severe acute respiratory syndrome coronavirus 2
ILRTTNGDF

SEQ ID NO: 6033 - protein, 10 aa, Severe acute respiratory syndrome coronavirus 2
ILRTTNGDFL

SEQ ID NO: 6034 - protein, 9 aa, Severe acute respiratory syndrome coronavirus 2
RTTNGDFLH

SEQ ID NO: 6035 - protein, 10 aa, Severe acute respiratory syndrome coronavirus 2
RTTNGDFLHF

SEQ ID NO: 6036 - protein, 9 aa, Severe acute respiratory syndrome coronavirus 2
TTNGDFLHF

SEQ ID NO: 6037 - protein, 10 aa, Severe acute respiratory syndrome coronavirus 2
TTNGDFLHFL

SEQ ID NO: 6038 - protein, 9 aa, Severe acute respiratory syndrome coronavirus 2
GDFLHFLPR

SEQ ID NO: 6039 - protein, 10 aa, Severe acute respiratory syndrome coronavirus 2
DFLHFLPRVF

SEQ ID NO: 6040 - protein, 9 aa, Severe acute respiratory syndrome coronavirus 2
HFLPRVFSA

SEQ ID NO: 6041 - protein, 9 aa, Severe acute respiratory syndrome coronavirus 2
FLPRVFSAV

SEQ ID NO: 6042 - protein, 9 aa, Severe acute respiratory syndrome coronavirus 2
LPRVFSAVG

SEQ ID NO: 6043 - protein, 9 aa, Severe acute respiratory syndrome coronavirus 2
RVFSAVGNI

SEQ ID NO: 6044 - protein, 10 aa, Severe acute respiratory syndrome coronavirus 2
VFSAVGNICY

SEQ ID NO: 6045 - protein, 9 aa, Severe acute respiratory syndrome coronavirus 2
FSAVGNICY

SEQ ID NO: 6046 - protein, 10 aa, Severe acute respiratory syndrome coronavirus 2
FSAVGNICYT

SEQ ID NO: 6047 - protein, 10 aa, Severe acute respiratory syndrome coronavirus 2
VGNICYTPSK

SEQ ID NO: 6048 - protein, 10 aa, Severe acute respiratory syndrome coronavirus 2
CYTPSKLIEY

SEQ ID NO: 6049 - protein, 9 aa, Severe acute respiratory syndrome coronavirus 2
YTPSKLIEY

SEQ ID NO: 6050 - protein, 10 aa, Severe acute respiratory syndrome coronavirus 2
TPSKLIEYTD

SEQ ID NO: 6051 - protein, 9 aa, Severe acute respiratory syndrome coronavirus 2
KLIEYTDFA

SEQ ID NO: 6052 - protein, 10 aa, Severe acute respiratory syndrome coronavirus 2
KLIEYTDFAT

SEQ ID NO: 6053 - protein, 10 aa, Severe acute respiratory syndrome coronavirus 2
IEYTDFATSA

SEQ ID NO: 6054 - protein, 9 aa, Severe acute respiratory syndrome coronavirus 2
YTDFATSAC

SEQ ID NO: 6055 - protein, 10 aa, Severe acute respiratory syndrome coronavirus 2
YTDFATSACV

SEQ ID NO: 6056 - protein, 10 aa, Severe acute respiratory syndrome coronavirus 2
TDFATSACVL

SEQ ID NO: 6057 - protein, 9 aa, Severe acute respiratory syndrome coronavirus 2
DFATSACVL

SEQ ID NO: 6058 - protein, 9 aa, Severe acute respiratory syndrome coronavirus 2
ATSACVLAA

SEQ ID NO: 6059 - protein, 9 aa, Severe acute respiratory syndrome coronavirus 2
VLAAECTIF

SEQ ID NO: 6060 - protein, 10 aa, Severe acute respiratory syndrome coronavirus 2
VLAAECTIFK

SEQ ID NO: 6061 - protein, 9 aa, Severe acute respiratory syndrome coronavirus 2
LAAECTIFK

SEQ ID NO: 6062 - protein, 10 aa, Severe acute respiratory syndrome coronavirus 2
CTIFKDASGK

SEQ ID NO: 6063 - protein, 9 aa, Severe acute respiratory syndrome coronavirus 2
TIFKDASGK

SEQ ID NO: 6064 - protein, 9 aa, Severe acute respiratory syndrome coronavirus 2
DASGKPVPY

SEQ ID NO: 6065 - protein, 10 aa, Severe acute respiratory syndrome coronavirus 2
ASGKPVPYCY

SEQ ID NO: 6066 - protein, 9 aa, Severe acute respiratory syndrome coronavirus 2
VPYCYDTNV

SEQ ID NO: 6067 - protein, 10 aa, Severe acute respiratory syndrome coronavirus 2
VPYCYDTNVL

SEQ ID NO: 6068 - protein, 9 aa, Severe acute respiratory syndrome coronavirus 2
PYCYDTNVL

SEQ ID NO: 6069 - protein, 10 aa, Severe acute respiratory syndrome coronavirus 2
PYCYDTNVLE

SEQ ID NO: 6070 - protein, 9 aa, Severe acute respiratory syndrome coronavirus 2
DTNVLEGSV

SEQ ID NO: 6071 - protein, 9 aa, Severe acute respiratory syndrome coronavirus 2
NVLEGSVAY

SEQ ID NO: 6072 - protein, 10 aa, Severe acute respiratory syndrome coronavirus 2
VLEGSVAYES

SEQ ID NO: 6073 - protein, 10 aa, Severe acute respiratory syndrome coronavirus 2
LEGSVAYESL

SEQ ID NO: 6074 - protein, 10 aa, Severe acute respiratory syndrome coronavirus 2
YESLRPDTRY

SEQ ID NO: 6075 - protein, 9 aa, Severe acute respiratory syndrome coronavirus 2
ESLRPDTRY

SEQ ID NO: 6076 - protein, 9 aa, Severe acute respiratory syndrome coronavirus 2
SLRPDTRYV

SEQ ID NO: 6077 - protein, 10 aa, Severe acute respiratory syndrome coronavirus 2
SLRPDTRYVL

SEQ ID NO: 6078 - protein, 9 aa, Severe acute respiratory syndrome coronavirus 2
RPDTRYVLM

SEQ ID NO: 6079 - protein, 10 aa, Severe acute respiratory syndrome coronavirus 2
RPDTRYVLMD

SEQ ID NO: 6080 - protein, 9 aa, Severe acute respiratory syndrome coronavirus 2
RYVLMDGSI

SEQ ID NO: 6081 - protein, 10 aa, Severe acute respiratory syndrome coronavirus 2
RYVLMDGSII

SEQ ID NO: 6082 - protein, 9 aa, Severe acute respiratory syndrome coronavirus 2
YVLMDGSII

SEQ ID NO: 6083 - protein, 10 aa, Severe acute respiratory syndrome coronavirus 2
VLMDGSIIQF

SEQ ID NO: 6084 - protein, 9 aa, Severe acute respiratory syndrome coronavirus 2
LMDGSIIQF

SEQ ID NO: 6085 - protein, 10 aa, Severe acute respiratory syndrome coronavirus 2
LMDGSIIQFP

SEQ ID NO: 6086 - protein, 10 aa, Severe acute respiratory syndrome coronavirus 2
GSIIQFPNTY

SEQ ID NO: 6087 - protein, 9 aa, Severe acute respiratory syndrome coronavirus 2
SIIQFPNTY

SEQ ID NO: 6088 - protein, 10 aa, Severe acute respiratory syndrome coronavirus 2
SIIQFPNTYL

SEQ ID NO: 6089 - protein, 9 aa, Severe acute respiratory syndrome coronavirus 2
IIQFPNTYL

SEQ ID NO: 6090 - protein, 10 aa, Severe acute respiratory syndrome coronavirus 2
FPNTYLEGSV

SEQ ID NO: 6091 - protein, 9 aa, Severe acute respiratory syndrome coronavirus 2
YLEGSVRVV

SEQ ID NO: 6092 - protein, 10 aa, Severe acute respiratory syndrome coronavirus 2
YLEGSVRVVT

SEQ ID NO: 6093 - protein, 10 aa, Severe acute respiratory syndrome coronavirus 2
EGSVRVVTTF

SEQ ID NO: 6094 - protein, 10 aa, Severe acute respiratory syndrome coronavirus 2
RVVTTFDSEY

SEQ ID NO: 6095 - protein, 9 aa, Severe acute respiratory syndrome coronavirus 2
TTFDSEYCR

SEQ ID NO: 6096 - protein, 10 aa, Severe acute respiratory syndrome coronavirus 2
TTFDSEYCRH

SEQ ID NO: 6097 - protein, 9 aa, Severe acute respiratory syndrome coronavirus 2
DSEYCRHGT

SEQ ID NO: 6098 - protein, 10 aa, Severe acute respiratory syndrome coronavirus 2
DSEYCRHGTC

SEQ ID NO: 6099 - protein, 9 aa, Severe acute respiratory syndrome coronavirus 2
SEYCRHGTC

SEQ ID NO: 6100 - protein, 10 aa, Severe acute respiratory syndrome coronavirus 2
SEYCRHGTCE

SEQ ID NO: 6101 - protein, 10 aa, Severe acute respiratory syndrome coronavirus 2
RSEAGVCVST

SEQ ID NO: 6102 - protein, 9 aa, Severe acute respiratory syndrome coronavirus 2
SEAGVCVST

SEQ ID NO: 6103 - protein, 10 aa, Severe acute respiratory syndrome coronavirus 2
SEAGVCVSTS

SEQ ID NO: 6104 - protein, 9 aa, Severe acute respiratory syndrome coronavirus 2
GVCVSTSGR

SEQ ID NO: 6105 - protein, 9 aa, Severe acute respiratory syndrome coronavirus 2
CVSTSGRWV

SEQ ID NO: 6106 - protein, 10 aa, Severe acute respiratory syndrome coronavirus 2
CVSTSGRWVL

SEQ ID NO: 6107 - protein, 9 aa, Severe acute respiratory syndrome coronavirus 2
VSTSGRWVL

SEQ ID NO: 6108 - protein, 10 aa, Severe acute respiratory syndrome coronavirus 2
RWVLNNDYYR

SEQ ID NO: 6109 - protein, 10 aa, Severe acute respiratory syndrome coronavirus 2
VLNNDYYRSL

SEQ ID NO: 6110 - protein, 10 aa, Severe acute respiratory syndrome coronavirus 2
DYYRSLPGVF

SEQ ID NO: 6111 - protein, 10 aa, Severe acute respiratory syndrome coronavirus 2
YYRSLPGVFC

SEQ ID NO: 6112 - protein, 10 aa, Severe acute respiratory syndrome coronavirus 2
RSLPGVFCGV

SEQ ID NO: 6113 - protein, 9 aa, Severe acute respiratory syndrome coronavirus 2
SLPGVFCGV

SEQ ID NO: 6114 - protein, 9 aa, Severe acute respiratory syndrome coronavirus 2
GVFCGVDAV

SEQ ID NO: 6115 - protein, 10 aa, Severe acute respiratory syndrome coronavirus 2
VFCGVDAVNL

SEQ ID NO: 6116 - protein, 9 aa, Severe acute respiratory syndrome coronavirus 2
AVNLLTNMF

SEQ ID NO: 6117 - protein, 10 aa, Severe acute respiratory syndrome coronavirus 2
AVNLLTNMFT

SEQ ID NO: 6118 - protein, 10 aa, Severe acute respiratory syndrome coronavirus 2
NLLTNMFTPL

SEQ ID NO: 6119 - protein, 9 aa, Severe acute respiratory syndrome coronavirus 2
LLTNMFTPL

SEQ ID NO: 6120 - protein, 10 aa, Severe acute respiratory syndrome coronavirus 2
LLTNMFTPLI

SEQ ID NO: 6121 - protein, 10 aa, Severe acute respiratory syndrome coronavirus 2
LTNMFTPLIQ

SEQ ID NO: 6122 - protein, 10 aa, Severe acute respiratory syndrome coronavirus 2
NMFTPLIQPI

SEQ ID NO: 6123 - protein, 10 aa, Severe acute respiratory syndrome coronavirus 2
MFTPLIQPIG

SEQ ID NO: 6124 - protein, 10 aa, Severe acute respiratory syndrome coronavirus 2
TPLIQPIGAL

SEQ ID NO: 6125 - protein, 9 aa, Severe acute respiratory syndrome coronavirus 2
GALDISASI

SEQ ID NO: 6126 - protein, 9 aa, Severe acute respiratory syndrome coronavirus 2
ALDISASIV

SEQ ID NO: 6127 - protein, 10 aa, Severe acute respiratory syndrome coronavirus 2
ALDISASIVA

SEQ ID NO: 6128 - protein, 10 aa, Severe acute respiratory syndrome coronavirus 2
SASIVAGGIV

SEQ ID NO: 6129 - protein, 10 aa, Severe acute respiratory syndrome coronavirus 2
SIVAGGIVAI

SEQ ID NO: 6130 - protein, 10 aa, Severe acute respiratory syndrome coronavirus 2
IVAGGIVAIV

SEQ ID NO: 6131 - protein, 10 aa, Severe acute respiratory syndrome coronavirus 2
GIVAIVVTCL

SEQ ID NO: 6132 - protein, 9 aa, Severe acute respiratory syndrome coronavirus 2
IVAIVVTCL

SEQ ID NO: 6133 - protein, 10 aa, Severe acute respiratory syndrome coronavirus 2
IVAIVVTCLA

SEQ ID NO: 6134 - protein, 10 aa, Severe acute respiratory syndrome coronavirus 2
VAIVVTCLAY

SEQ ID NO: 6135 - protein, 9 aa, Severe acute respiratory syndrome coronavirus 2
AIVVTCLAY

SEQ ID NO: 6136 - protein, 10 aa, Severe acute respiratory syndrome coronavirus 2
AIVVTCLAYY

SEQ ID NO: 6137 - protein, 9 aa, Severe acute respiratory syndrome coronavirus 2
IVVTCLAYY

SEQ ID NO: 6138 - protein, 10 aa, Severe acute respiratory syndrome coronavirus 2
IVVTCLAYYF

SEQ ID NO: 6139 - protein, 10 aa, Severe acute respiratory syndrome coronavirus 2
VTCLAYYFMR

SEQ ID NO: 6140 - protein, 10 aa, Severe acute respiratory syndrome coronavirus 2
TCLAYYFMRF

SEQ ID NO: 6141 - protein, 9 aa, Severe acute respiratory syndrome coronavirus 2
CLAYYFMRF

SEQ ID NO: 6142 - protein, 10 aa, Severe acute respiratory syndrome coronavirus 2
CLAYYFMRFR

SEQ ID NO: 6143 - protein, 9 aa, Severe acute respiratory syndrome coronavirus 2
LAYYFMRFR

SEQ ID NO: 6144 - protein, 10 aa, Severe acute respiratory syndrome coronavirus 2
LAYYFMRFRR

SEQ ID NO: 6145 - protein, 9 aa, Severe acute respiratory syndrome coronavirus 2
AYYFMRFRR

SEQ ID NO: 6146 - protein, 10 aa, Severe acute respiratory syndrome coronavirus 2
AYYFMRFRRA

SEQ ID NO: 6147 - protein, 9 aa, Severe acute respiratory syndrome coronavirus 2
YYFMRFRRA

SEQ ID NO: 6148 - protein, 10 aa, Severe acute respiratory syndrome coronavirus 2
YYFMRFRRAF

SEQ ID NO: 6149 - protein, 9 aa, Severe acute respiratory syndrome coronavirus 2
YFMRFRRAF

SEQ ID NO: 6150 - protein, 9 aa, Severe acute respiratory syndrome coronavirus 2
GEYSHVVAF

SEQ ID NO: 6151 - protein, 9 aa, Severe acute respiratory syndrome coronavirus 2
EYSHVVAFN

SEQ ID NO: 6152 - protein, 10 aa, Severe acute respiratory syndrome coronavirus 2
EYSHVVAFNT

SEQ ID NO: 6153 - protein, 10 aa, Severe acute respiratory syndrome coronavirus 2
YSHVVAFNTL

SEQ ID NO: 6154 - protein, 10 aa, Severe acute respiratory syndrome coronavirus 2
SHVVAFNTLL

SEQ ID NO: 6155 - protein, 9 aa, Severe acute respiratory syndrome coronavirus 2
HVVAFNTLL

SEQ ID NO: 6156 - protein, 10 aa, Severe acute respiratory syndrome coronavirus 2
HVVAFNTLLF

SEQ ID NO: 6157 - protein, 9 aa, Severe acute respiratory syndrome coronavirus 2
VVAFNTLLF

SEQ ID NO: 6158 - protein, 10 aa, Severe acute respiratory syndrome coronavirus 2
VVAFNTLLFL

SEQ ID NO: 6159 - protein, 10 aa, Severe acute respiratory syndrome coronavirus 2
VAFNTLLFLM

SEQ ID NO: 6160 - protein, 10 aa, Severe acute respiratory syndrome coronavirus 2
FNTLLFLMSF

SEQ ID NO: 6161 - protein, 9 aa, Severe acute respiratory syndrome coronavirus 2
NTLLFLMSF

SEQ ID NO: 6162 - protein, 10 aa, Severe acute respiratory syndrome coronavirus 2
NTLLFLMSFT

SEQ ID NO: 6163 - protein, 9 aa, Severe acute respiratory syndrome coronavirus 2
TLLFLMSFT

SEQ ID NO: 6164 - protein, 10 aa, Severe acute respiratory syndrome coronavirus 2
TLLFLMSFTV

SEQ ID NO: 6165 - protein, 9 aa, Severe acute respiratory syndrome coronavirus 2
LLFLMSFTV

SEQ ID NO: 6166 - protein, 10 aa, Severe acute respiratory syndrome coronavirus 2
LLFLMSFTVL

SEQ ID NO: 6167 - protein, 9 aa, Severe acute respiratory syndrome coronavirus 2
LFLMSFTVL

SEQ ID NO: 6168 - protein, 10 aa, Severe acute respiratory syndrome coronavirus 2
LFLMSFTVLC

SEQ ID NO: 6169 - protein, 10 aa, Severe acute respiratory syndrome coronavirus 2
FLMSFTVLCL

SEQ ID NO: 6170 - protein, 9 aa, Severe acute respiratory syndrome coronavirus 2
LMSFTVLCL

SEQ ID NO: 6171 - protein, 10 aa, Severe acute respiratory syndrome coronavirus 2
LMSFTVLCLT

SEQ ID NO: 6172 - protein, 9 aa, Severe acute respiratory syndrome coronavirus 2
MSFTVLCLT

SEQ ID NO: 6173 - protein, 10 aa, Severe acute respiratory syndrome coronavirus 2
SFTVLCLTPV

SEQ ID NO: 6174 - protein, 9 aa, Severe acute respiratory syndrome coronavirus 2
FTVLCLTPV

SEQ ID NO: 6175 - protein, 10 aa, Severe acute respiratory syndrome coronavirus 2
FTVLCLTPVY

SEQ ID NO: 6176 - protein, 9 aa, Severe acute respiratory syndrome coronavirus 2
TVLCLTPVY

SEQ ID NO: 6177 - protein, 10 aa, Severe acute respiratory syndrome coronavirus 2
TVLCLTPVYS

SEQ ID NO: 6178 - protein, 10 aa, Severe acute respiratory syndrome coronavirus 2
VLCLTPVYSF

SEQ ID NO: 6179 - protein, 9 aa, Severe acute respiratory syndrome coronavirus 2
LCLTPVYSF

SEQ ID NO: 6180 - protein, 9 aa, Severe acute respiratory syndrome coronavirus 2
CLTPVYSFL

SEQ ID NO: 6181 - protein, 9 aa, Severe acute respiratory syndrome coronavirus 2
LTPVYSFLP

SEQ ID NO: 6182 - protein, 9 aa, Severe acute respiratory syndrome coronavirus 2
TPVYSFLPG

SEQ ID NO: 6183 - protein, 10 aa, Severe acute respiratory syndrome coronavirus 2
TPVYSFLPGV

SEQ ID NO: 6184 - protein, 9 aa, Severe acute respiratory syndrome coronavirus 2
VYSFLPGVY

SEQ ID NO: 6185 - protein, 10 aa, Severe acute respiratory syndrome coronavirus 2
VYSFLPGVYS

SEQ ID NO: 6186 - protein, 10 aa, Severe acute respiratory syndrome coronavirus 2
YSFLPGVYSV

SEQ ID NO: 6187 - protein, 9 aa, Severe acute respiratory syndrome coronavirus 2
SFLPGVYSV

SEQ ID NO: 6188 - protein, 10 aa, Severe acute respiratory syndrome coronavirus 2
SFLPGVYSVI

SEQ ID NO: 6189 - protein, 9 aa, Severe acute respiratory syndrome coronavirus 2
FLPGVYSVI

SEQ ID NO: 6190 - protein, 10 aa, Severe acute respiratory syndrome coronavirus 2
FLPGVYSVIY

SEQ ID NO: 6191 - protein, 10 aa, Severe acute respiratory syndrome coronavirus 2
LPGVYSVIYL

SEQ ID NO: 6192 - protein, 9 aa, Severe acute respiratory syndrome coronavirus 2
GVYSVIYLY

SEQ ID NO: 6193 - protein, 10 aa, Severe acute respiratory syndrome coronavirus 2
GVYSVIYLYL

SEQ ID NO: 6194 - protein, 9 aa, Severe acute respiratory syndrome coronavirus 2
VYSVIYLYL

SEQ ID NO: 6195 - protein, 10 aa, Severe acute respiratory syndrome coronavirus 2
VYSVIYLYLT

SEQ ID NO: 6196 - protein, 10 aa, Severe acute respiratory syndrome coronavirus 2
YSVIYLYLTF

SEQ ID NO: 6197 - protein, 9 aa, Severe acute respiratory syndrome coronavirus 2
SVIYLYLTF

SEQ ID NO: 6198 - protein, 10 aa, Severe acute respiratory syndrome coronavirus 2
SVIYLYLTFY

SEQ ID NO: 6199 - protein, 9 aa, Severe acute respiratory syndrome coronavirus 2
VIYLYLTFY

SEQ ID NO: 6200 - protein, 10 aa, Severe acute respiratory syndrome coronavirus 2
VIYLYLTFYL

SEQ ID NO: 6201 - protein, 10 aa, Severe acute respiratory syndrome coronavirus 2
IYLYLTFYLT

SEQ ID NO: 6202 - protein, 9 aa, Severe acute respiratory syndrome coronavirus 2
YLYLTFYLT

SEQ ID NO: 6203 - protein, 10 aa, Severe acute respiratory syndrome coronavirus 2
YLYLTFYLTN

SEQ ID NO: 6204 - protein, 9 aa, Severe acute respiratory syndrome coronavirus 2
LYLTFYLTN

SEQ ID NO: 6205 - protein, 10 aa, Severe acute respiratory syndrome coronavirus 2
LYLTFYLTND

SEQ ID NO: 6206 - protein, 9 aa, Severe acute respiratory syndrome coronavirus 2
YLTFYLTND

SEQ ID NO: 6207 - protein, 10 aa, Severe acute respiratory syndrome coronavirus 2
YLTFYLTNDV

SEQ ID NO: 6208 - protein, 9 aa, Severe acute respiratory syndrome coronavirus 2
LTFYLTNDV

SEQ ID NO: 6209 - protein, 10 aa, Severe acute respiratory syndrome coronavirus 2
TFYLTNDVSF

SEQ ID NO: 6210 - protein, 9 aa, Severe acute respiratory syndrome coronavirus 2
FYLTNDVSF

SEQ ID NO: 6211 - protein, 10 aa, Severe acute respiratory syndrome coronavirus 2
FYLTNDVSFL

SEQ ID NO: 6212 - protein, 9 aa, Severe acute respiratory syndrome coronavirus 2
YLTNDVSFL

SEQ ID NO: 6213 - protein, 10 aa, Severe acute respiratory syndrome coronavirus 2
YLTNDVSFLA

SEQ ID NO: 6214 - protein, 9 aa, Severe acute respiratory syndrome coronavirus 2
LTNDVSFLA

SEQ ID NO: 6215 - protein, 10 aa, Severe acute respiratory syndrome coronavirus 2
TNDVSFLAHI

SEQ ID NO: 6216 - protein, 9 aa, Severe acute respiratory syndrome coronavirus 2
NDVSFLAHI

SEQ ID NO: 6217 - protein, 9 aa, Severe acute respiratory syndrome coronavirus 2
VSFLAHIQW

SEQ ID NO: 6218 - protein, 9 aa, Severe acute respiratory syndrome coronavirus 2
SFLAHIQWM

SEQ ID NO: 6219 - protein, 10 aa, Severe acute respiratory syndrome coronavirus 2
SFLAHIQWMV

SEQ ID NO: 6220 - protein, 9 aa, Severe acute respiratory syndrome coronavirus 2
FLAHIQWMV

SEQ ID NO: 6221 - protein, 10 aa, Severe acute respiratory syndrome coronavirus 2
FLAHIQWMVM

SEQ ID NO: 6222 - protein, 9 aa, Severe acute respiratory syndrome coronavirus 2
LAHIQWMVM

SEQ ID NO: 6223 - protein, 9 aa, Severe acute respiratory syndrome coronavirus 2
AHIQWMVMF

SEQ ID NO: 6224 - protein, 10 aa, Severe acute respiratory syndrome coronavirus 2
AHIQWMVMFT

SEQ ID NO: 6225 - protein, 9 aa, Severe acute respiratory syndrome coronavirus 2
IQWMVMFTP

SEQ ID NO: 6226 - protein, 10 aa, Severe acute respiratory syndrome coronavirus 2
IQWMVMFTPL

SEQ ID NO: 6227 - protein, 9 aa, Severe acute respiratory syndrome coronavirus 2
QWMVMFTPL

SEQ ID NO: 6228 - protein, 10 aa, Severe acute respiratory syndrome coronavirus 2
QWMVMFTPLV

SEQ ID NO: 6229 - protein, 10 aa, Severe acute respiratory syndrome coronavirus 2
WMVMFTPLVP

SEQ ID NO: 6230 - protein, 9 aa, Severe acute respiratory syndrome coronavirus 2
MVMFTPLVP

SEQ ID NO: 6231 - protein, 10 aa, Severe acute respiratory syndrome coronavirus 2
MVMFTPLVPF

SEQ ID NO: 6232 - protein, 9 aa, Severe acute respiratory syndrome coronavirus 2
VMFTPLVPF

SEQ ID NO: 6233 - protein, 10 aa, Severe acute respiratory syndrome coronavirus 2
VMFTPLVPFW

SEQ ID NO: 6234 - protein, 9 aa, Severe acute respiratory syndrome coronavirus 2
MFTPLVPFW

SEQ ID NO: 6235 - protein, 10 aa, Severe acute respiratory syndrome coronavirus 2
MFTPLVPFWI

SEQ ID NO: 6236 - protein, 9 aa, Severe acute respiratory syndrome coronavirus 2
FTPLVPFWI

SEQ ID NO: 6237 - protein, 10 aa, Severe acute respiratory syndrome coronavirus 2
FTPLVPFWIT

SEQ ID NO: 6238 - protein, 10 aa, Severe acute respiratory syndrome coronavirus 2
TPLVPFWITI

SEQ ID NO: 6239 - protein, 9 aa, Severe acute respiratory syndrome coronavirus 2
PLVPFWITI

SEQ ID NO: 6240 - protein, 10 aa, Severe acute respiratory syndrome coronavirus 2
PLVPFWITIA

SEQ ID NO: 6241 - protein, 9 aa, Severe acute respiratory syndrome coronavirus 2
LVPFWITIA

SEQ ID NO: 6242 - protein, 10 aa, Severe acute respiratory syndrome coronavirus 2
LVPFWITIAY

SEQ ID NO: 6243 - protein, 9 aa, Severe acute respiratory syndrome coronavirus 2
VPFWITIAY

SEQ ID NO: 6244 - protein, 10 aa, Severe acute respiratory syndrome coronavirus 2
VPFWITIAYI

SEQ ID NO: 6245 - protein, 9 aa, Severe acute respiratory syndrome coronavirus 2
PFWITIAYI

SEQ ID NO: 6246 - protein, 10 aa, Severe acute respiratory syndrome coronavirus 2
PFWITIAYII

SEQ ID NO: 6247 - protein, 9 aa, Severe acute respiratory syndrome coronavirus 2
FWITIAYII

SEQ ID NO: 6248 - protein, 10 aa, Severe acute respiratory syndrome coronavirus 2
WITIAYIICI

SEQ ID NO: 6249 - protein, 9 aa, Severe acute respiratory syndrome coronavirus 2
ITIAYIICI

SEQ ID NO: 6250 - protein, 10 aa, Severe acute respiratory syndrome coronavirus 2
TIAYIICIST

SEQ ID NO: 6251 - protein, 10 aa, Severe acute respiratory syndrome coronavirus 2
IAYIICISTK

SEQ ID NO: 6252 - protein, 9 aa, Severe acute respiratory syndrome coronavirus 2
AYIICISTK

SEQ ID NO: 6253 - protein, 9 aa, Severe acute respiratory syndrome coronavirus 2
YIICISTKH

SEQ ID NO: 6254 - protein, 10 aa, Severe acute respiratory syndrome coronavirus 2
IICISTKHFY

SEQ ID NO: 6255 - protein, 9 aa, Severe acute respiratory syndrome coronavirus 2
ICISTKHFY

SEQ ID NO: 6256 - protein, 10 aa, Severe acute respiratory syndrome coronavirus 2
ICISTKHFYW

SEQ ID NO: 6257 - protein, 9 aa, Severe acute respiratory syndrome coronavirus 2
CISTKHFYW

SEQ ID NO: 6258 - protein, 10 aa, Severe acute respiratory syndrome coronavirus 2
CISTKHFYWF

SEQ ID NO: 6259 - protein, 9 aa, Severe acute respiratory syndrome coronavirus 2
ISTKHFYWF

SEQ ID NO: 6260 - protein, 10 aa, Severe acute respiratory syndrome coronavirus 2
ISTKHFYWFF

SEQ ID NO: 6261 - protein, 9 aa, Severe acute respiratory syndrome coronavirus 2
STKHFYWFF

SEQ ID NO: 6262 - protein, 10 aa, Severe acute respiratory syndrome coronavirus 2
STKHFYWFFS

SEQ ID NO: 6263 - protein, 10 aa, Severe acute respiratory syndrome coronavirus 2
KHFYWFFSNY

SEQ ID NO: 6264 - protein, 9 aa, Severe acute respiratory syndrome coronavirus 2
HFYWFFSNY

SEQ ID NO: 6265 - protein, 10 aa, Severe acute respiratory syndrome coronavirus 2
HFYWFFSNYL

SEQ ID NO: 6266 - protein, 9 aa, Severe acute respiratory syndrome coronavirus 2
FYWFFSNYL

SEQ ID NO: 6267 - protein, 10 aa, Severe acute respiratory syndrome coronavirus 2
FYWFFSNYLK

SEQ ID NO: 6268 - protein, 9 aa, Severe acute respiratory syndrome coronavirus 2
YWFFSNYLK

SEQ ID NO: 6269 - protein, 10 aa, Severe acute respiratory syndrome coronavirus 2
YWFFSNYLKR

SEQ ID NO: 6270 - protein, 9 aa, Severe acute respiratory syndrome coronavirus 2
FSNYLKRRV

SEQ ID NO: 6271 - protein, 10 aa, Severe acute respiratory syndrome coronavirus 2
FSNYLKRRVV

SEQ ID NO: 6272 - protein, 10 aa, Severe acute respiratory syndrome coronavirus 2
SNYLKRRVVF

SEQ ID NO: 6273 - protein, 9 aa, Severe acute respiratory syndrome coronavirus 2
NYLKRRVVF

SEQ ID NO: 6274 - protein, 10 aa, Severe acute respiratory syndrome coronavirus 2
NYLKRRVVFN

SEQ ID NO: 6275 - protein, 10 aa, Severe acute respiratory syndrome coronavirus 2
RRVVFNGVSF

SEQ ID NO: 6276 - protein, 9 aa, Severe acute respiratory syndrome coronavirus 2
RVVFNGVSF

SEQ ID NO: 6277 - protein, 9 aa, Severe acute respiratory syndrome coronavirus 2
VVFNGVSFS

SEQ ID NO: 6278 - protein, 10 aa, Severe acute respiratory syndrome coronavirus 2
VVFNGVSFST

SEQ ID NO: 6279 - protein, 10 aa, Severe acute respiratory syndrome coronavirus 2
VFNGVSFSTF

SEQ ID NO: 6280 - protein, 9 aa, Severe acute respiratory syndrome coronavirus 2
FNGVSFSTF

SEQ ID NO: 6281 - protein, 10 aa, Severe acute respiratory syndrome coronavirus 2
SFSTFEEAAL

SEQ ID NO: 6282 - protein, 10 aa, Severe acute respiratory syndrome coronavirus 2
TFEEAALCTF

SEQ ID NO: 6283 - protein, 9 aa, Severe acute respiratory syndrome coronavirus 2
FEEAALCTF

SEQ ID NO: 6284 - protein, 10 aa, Severe acute respiratory syndrome coronavirus 2
FEEAALCTFL

SEQ ID NO: 6285 - protein, 9 aa, Severe acute respiratory syndrome coronavirus 2
EEAALCTFL

SEQ ID NO: 6286 - protein, 10 aa, Severe acute respiratory syndrome coronavirus 2
EEAALCTFLL

SEQ ID NO: 6287 - protein, 10 aa, Severe acute respiratory syndrome coronavirus 2
AALCTFLLNK

SEQ ID NO: 6288 - protein, 9 aa, Severe acute respiratory syndrome coronavirus 2
ALCTFLLNK

SEQ ID NO: 6289 - protein, 10 aa, Severe acute respiratory syndrome coronavirus 2
ALCTFLLNKE

SEQ ID NO: 6290 - protein, 9 aa, Severe acute respiratory syndrome coronavirus 2
CTFLLNKEM

SEQ ID NO: 6291 - protein, 10 aa, Severe acute respiratory syndrome coronavirus 2
CTFLLNKEMY

SEQ ID NO: 6292 - protein, 10 aa, Severe acute respiratory syndrome coronavirus 2
TFLLNKEMYL

SEQ ID NO: 6293 - protein, 9 aa, Severe acute respiratory syndrome coronavirus 2
FLLNKEMYL

SEQ ID NO: 6294 - protein, 10 aa, Severe acute respiratory syndrome coronavirus 2
FLLNKEMYLK

SEQ ID NO: 6295 - protein, 9 aa, Severe acute respiratory syndrome coronavirus 2
LLNKEMYLK

SEQ ID NO: 6296 - protein, 9 aa, Severe acute respiratory syndrome coronavirus 2
KEMYLKLRS

SEQ ID NO: 6297 - protein, 10 aa, Severe acute respiratory syndrome coronavirus 2
KEMYLKLRSD

SEQ ID NO: 6298 - protein, 9 aa, Severe acute respiratory syndrome coronavirus 2
MYLKLRSDV

SEQ ID NO: 6299 - protein, 10 aa, Severe acute respiratory syndrome coronavirus 2
MYLKLRSDVL

SEQ ID NO: 6300 - protein, 9 aa, Severe acute respiratory syndrome coronavirus 2
YLKLRSDVL

SEQ ID NO: 6301 - protein, 10 aa, Severe acute respiratory syndrome coronavirus 2
YLKLRSDVLL

SEQ ID NO: 6302 - protein, 10 aa, Severe acute respiratory syndrome coronavirus 2
KLRSDVLLPL

SEQ ID NO: 6303 - protein, 9 aa, Severe acute respiratory syndrome coronavirus 2
RSDVLLPLT

SEQ ID NO: 6304 - protein, 10 aa, Severe acute respiratory syndrome coronavirus 2
RSDVLLPLTQ

SEQ ID NO: 6305 - protein, 10 aa, Severe acute respiratory syndrome coronavirus 2
SDVLLPLTQY

SEQ ID NO: 6306 - protein, 10 aa, Severe acute respiratory syndrome coronavirus 2
VLLPLTQYNR

SEQ ID NO: 6307 - protein, 10 aa, Severe acute respiratory syndrome coronavirus 2
LLPLTQYNRY

SEQ ID NO: 6308 - protein, 10 aa, Severe acute respiratory syndrome coronavirus 2
LPLTQYNRYL

SEQ ID NO: 6309 - protein, 9 aa, Severe acute respiratory syndrome coronavirus 2
LTQYNRYLA

SEQ ID NO: 6310 - protein, 10 aa, Severe acute respiratory syndrome coronavirus 2
LTQYNRYLAL

SEQ ID NO: 6311 - protein, 9 aa, Severe acute respiratory syndrome coronavirus 2
TQYNRYLAL

SEQ ID NO: 6312 - protein, 10 aa, Severe acute respiratory syndrome coronavirus 2
TQYNRYLALY

SEQ ID NO: 6313 - protein, 9 aa, Severe acute respiratory syndrome coronavirus 2
RYLALYNKY

SEQ ID NO: 6314 - protein, 10 aa, Severe acute respiratory syndrome coronavirus 2
RYLALYNKYK

SEQ ID NO: 6315 - protein, 9 aa, Severe acute respiratory syndrome coronavirus 2
YLALYNKYK

SEQ ID NO: 6316 - protein, 10 aa, Severe acute respiratory syndrome coronavirus 2
YLALYNKYKY

SEQ ID NO: 6317 - protein, 9 aa, Severe acute respiratory syndrome coronavirus 2
LALYNKYKY

SEQ ID NO: 6318 - protein, 9 aa, Severe acute respiratory syndrome coronavirus 2
ALYNKYKYF

SEQ ID NO: 6319 - protein, 10 aa, Severe acute respiratory syndrome coronavirus 2
ALYNKYKYFS

SEQ ID NO: 6320 - protein, 9 aa, Severe acute respiratory syndrome coronavirus 2
KYKYFSGAM

SEQ ID NO: 6321 - protein, 10 aa, Severe acute respiratory syndrome coronavirus 2
FSGAMDTTSY

SEQ ID NO: 6322 - protein, 9 aa, Severe acute respiratory syndrome coronavirus 2
SGAMDTTSY

SEQ ID NO: 6323 - protein, 9 aa, Severe acute respiratory syndrome coronavirus 2
GAMDTTSYR

SEQ ID NO: 6324 - protein, 10 aa, Severe acute respiratory syndrome coronavirus 2
AMDTTSYREA

SEQ ID NO: 6325 - protein, 10 aa, Severe acute respiratory syndrome coronavirus 2
SYREAACCHL

SEQ ID NO: 6326 - protein, 10 aa, Severe acute respiratory syndrome coronavirus 2
REAACCHLAK

SEQ ID NO: 6327 - protein, 10 aa, Severe acute respiratory syndrome coronavirus 2
ALNDFSNSGS

SEQ ID NO: 6328 - protein, 9 aa, Severe acute respiratory syndrome coronavirus 2
FSNSGSDVL

SEQ ID NO: 6329 - protein, 10 aa, Severe acute respiratory syndrome coronavirus 2
FSNSGSDVLY

SEQ ID NO: 6330 - protein, 9 aa, Severe acute respiratory syndrome coronavirus 2
SNSGSDVLY

SEQ ID NO: 6331 - protein, 10 aa, Severe acute respiratory syndrome coronavirus 2
VLYQPPQTSI

SEQ ID NO: 6332 - protein, 9 aa, Severe acute respiratory syndrome coronavirus 2
LYQPPQTSI

SEQ ID NO: 6333 - protein, 10 aa, Severe acute respiratory syndrome coronavirus 2
LYQPPQTSIT

SEQ ID NO: 6334 - protein, 10 aa, Severe acute respiratory syndrome coronavirus 2
QPPQTSITSA

SEQ ID NO: 6335 - protein, 10 aa, Severe acute respiratory syndrome coronavirus 2
KRTIKGTHHW

SEQ ID NO: 6336 - protein, 9 aa, Severe acute respiratory syndrome coronavirus 2
RTIKGTHHW

SEQ ID NO: 6337 - protein, 10 aa, Severe acute respiratory syndrome coronavirus 2
RTIKGTHHWL

SEQ ID NO: 6338 - protein, 9 aa, Severe acute respiratory syndrome coronavirus 2
TIKGTHHWL

SEQ ID NO: 6339 - protein, 9 aa, Severe acute respiratory syndrome coronavirus 2
IKGTHHWLL

SEQ ID NO: 6340 - protein, 10 aa, Severe acute respiratory syndrome coronavirus 2
GTHHWLLLTI

SEQ ID NO: 6341 - protein, 10 aa, Severe acute respiratory syndrome coronavirus 2
THHWLLLTIL

SEQ ID NO: 6342 - protein, 10 aa, Severe acute respiratory syndrome coronavirus 2
HWLLLTILTS

SEQ ID NO: 6343 - protein, 10 aa, Severe acute respiratory syndrome coronavirus 2
WLLLTILTSL

SEQ ID NO: 6344 - protein, 9 aa, Severe acute respiratory syndrome coronavirus 2
LLLTILTSL

SEQ ID NO: 6345 - protein, 10 aa, Severe acute respiratory syndrome coronavirus 2
LLLTILTSLL

SEQ ID NO: 6346 - protein, 10 aa, Severe acute respiratory syndrome coronavirus 2
LLTILTSLLV

SEQ ID NO: 6347 - protein, 10 aa, Severe acute respiratory syndrome coronavirus 2
LTILTSLLVL

SEQ ID NO: 6348 - protein, 9 aa, Severe acute respiratory syndrome coronavirus 2
TILTSLLVL

SEQ ID NO: 6349 - protein, 10 aa, Severe acute respiratory syndrome coronavirus 2
TILTSLLVLV

SEQ ID NO: 6350 - protein, 10 aa, Severe acute respiratory syndrome coronavirus 2
LTSLLVLVQS

SEQ ID NO: 6351 - protein, 9 aa, Severe acute respiratory syndrome coronavirus 2
SLLVLVQST

SEQ ID NO: 6352 - protein, 10 aa, Severe acute respiratory syndrome coronavirus 2
VLVQSTQWSL

SEQ ID NO: 6353 - protein, 9 aa, Severe acute respiratory syndrome coronavirus 2
LVQSTQWSL

SEQ ID NO: 6354 - protein, 10 aa, Severe acute respiratory syndrome coronavirus 2
LVQSTQWSLF

SEQ ID NO: 6355 - protein, 9 aa, Severe acute respiratory syndrome coronavirus 2
VQSTQWSLF

SEQ ID NO: 6356 - protein, 10 aa, Severe acute respiratory syndrome coronavirus 2
VQSTQWSLFF

SEQ ID NO: 6357 - protein, 9 aa, Severe acute respiratory syndrome coronavirus 2
QSTQWSLFF

SEQ ID NO: 6358 - protein, 10 aa, Severe acute respiratory syndrome coronavirus 2
QSTQWSLFFF

SEQ ID NO: 6359 - protein, 9 aa, Severe acute respiratory syndrome coronavirus 2
STQWSLFFF

SEQ ID NO: 6360 - protein, 10 aa, Severe acute respiratory syndrome coronavirus 2
STQWSLFFFL

SEQ ID NO: 6361 - protein, 9 aa, Severe acute respiratory syndrome coronavirus 2
TQWSLFFFL

SEQ ID NO: 6362 - protein, 10 aa, Severe acute respiratory syndrome coronavirus 2
TQWSLFFFLY

SEQ ID NO: 6363 - protein, 10 aa, Severe acute respiratory syndrome coronavirus 2
QWSLFFFLYE

SEQ ID NO: 6364 - protein, 9 aa, Severe acute respiratory syndrome coronavirus 2
WSLFFFLYE

SEQ ID NO: 6365 - protein, 9 aa, Severe acute respiratory syndrome coronavirus 2
SLFFFLYEN

SEQ ID NO: 6366 - protein, 10 aa, Severe acute respiratory syndrome coronavirus 2
SLFFFLYENA

SEQ ID NO: 6367 - protein, 10 aa, Severe acute respiratory syndrome coronavirus 2
LFFFLYENAF

SEQ ID NO: 6368 - protein, 9 aa, Severe acute respiratory syndrome coronavirus 2
FFFLYENAF

SEQ ID NO: 6369 - protein, 10 aa, Severe acute respiratory syndrome coronavirus 2
FFFLYENAFL

SEQ ID NO: 6370 - protein, 9 aa, Severe acute respiratory syndrome coronavirus 2
FFLYENAFL

SEQ ID NO: 6371 - protein, 9 aa, Severe acute respiratory syndrome coronavirus 2
FLYENAFLP

SEQ ID NO: 6372 - protein, 10 aa, Severe acute respiratory syndrome coronavirus 2
FLYENAFLPF

SEQ ID NO: 6373 - protein, 9 aa, Severe acute respiratory syndrome coronavirus 2
LYENAFLPF

SEQ ID NO: 6374 - protein, 9 aa, Severe acute respiratory syndrome coronavirus 2
YENAFLPFA

SEQ ID NO: 6375 - protein, 10 aa, Severe acute respiratory syndrome coronavirus 2
YENAFLPFAM

SEQ ID NO: 6376 - protein, 9 aa, Severe acute respiratory syndrome coronavirus 2
AFLPFAMGI

SEQ ID NO: 6377 - protein, 9 aa, Severe acute respiratory syndrome coronavirus 2
FLPFAMGII

SEQ ID NO: 6378 - protein, 10 aa, Severe acute respiratory syndrome coronavirus 2
FLPFAMGIIA

SEQ ID NO: 6379 - protein, 9 aa, Severe acute respiratory syndrome coronavirus 2
LPFAMGIIA

SEQ ID NO: 6380 - protein, 10 aa, Severe acute respiratory syndrome coronavirus 2
LPFAMGIIAM

SEQ ID NO: 6381 - protein, 10 aa, Severe acute respiratory syndrome coronavirus 2
FAMGIIAMSA

SEQ ID NO: 6382 - protein, 9 aa, Severe acute respiratory syndrome coronavirus 2
IIAMSAFAM

SEQ ID NO: 6383 - protein, 10 aa, Severe acute respiratory syndrome coronavirus 2
IIAMSAFAMM

SEQ ID NO: 6384 - protein, 9 aa, Severe acute respiratory syndrome coronavirus 2
IAMSAFAMM

SEQ ID NO: 6385 - protein, 10 aa, Severe acute respiratory syndrome coronavirus 2
IAMSAFAMMF

SEQ ID NO: 6386 - protein, 9 aa, Severe acute respiratory syndrome coronavirus 2
AMSAFAMMF

SEQ ID NO: 6387 - protein, 10 aa, Severe acute respiratory syndrome coronavirus 2
AMSAFAMMFV

SEQ ID NO: 6388 - protein, 9 aa, Severe acute respiratory syndrome coronavirus 2
MSAFAMMFV

SEQ ID NO: 6389 - protein, 10 aa, Severe acute respiratory syndrome coronavirus 2
MSAFAMMFVK

SEQ ID NO: 6390 - protein, 9 aa, Severe acute respiratory syndrome coronavirus 2
SAFAMMFVK

SEQ ID NO: 6391 - protein, 9 aa, Severe acute respiratory syndrome coronavirus 2
FAMMFVKHK

SEQ ID NO: 6392 - protein, 10 aa, Severe acute respiratory syndrome coronavirus 2
FAMMFVKHKH

SEQ ID NO: 6393 - protein, 9 aa, Severe acute respiratory syndrome coronavirus 2
AMMFVKHKH

SEQ ID NO: 6394 - protein, 9 aa, Severe acute respiratory syndrome coronavirus 2
MMFVKHKHA

SEQ ID NO: 6395 - protein, 10 aa, Severe acute respiratory syndrome coronavirus 2
MMFVKHKHAF

SEQ ID NO: 6396 - protein, 9 aa, Severe acute respiratory syndrome coronavirus 2
MFVKHKHAF

SEQ ID NO: 6397 - protein, 10 aa, Severe acute respiratory syndrome coronavirus 2
MFVKHKHAFL

SEQ ID NO: 6398 - protein, 9 aa, Severe acute respiratory syndrome coronavirus 2
FVKHKHAFL

SEQ ID NO: 6399 - protein, 10 aa, Severe acute respiratory syndrome coronavirus 2
VKHKHAFLCL

SEQ ID NO: 6400 - protein, 9 aa, Severe acute respiratory syndrome coronavirus 2
KHKHAFLCL

SEQ ID NO: 6401 - protein, 10 aa, Severe acute respiratory syndrome coronavirus 2
KHKHAFLCLF

SEQ ID NO: 6402 - protein, 10 aa, Severe acute respiratory syndrome coronavirus 2
HKHAFLCLFL

SEQ ID NO: 6403 - protein, 10 aa, Severe acute respiratory syndrome coronavirus 2
KHAFLCLFLL

SEQ ID NO: 6404 - protein, 10 aa, Severe acute respiratory syndrome coronavirus 2
CLFLLPSLAT

SEQ ID NO: 6405 - protein, 10 aa, Severe acute respiratory syndrome coronavirus 2
LFLLPSLATV

SEQ ID NO: 6406 - protein, 10 aa, Severe acute respiratory syndrome coronavirus 2
FLLPSLATVA

SEQ ID NO: 6407 - protein, 10 aa, Severe acute respiratory syndrome coronavirus 2
LLPSLATVAY

SEQ ID NO: 6408 - protein, 9 aa, Severe acute respiratory syndrome coronavirus 2
LPSLATVAY

SEQ ID NO: 6409 - protein, 10 aa, Severe acute respiratory syndrome coronavirus 2
LPSLATVAYF

SEQ ID NO: 6410 - protein, 9 aa, Severe acute respiratory syndrome coronavirus 2
PSLATVAYF

SEQ ID NO: 6411 - protein, 9 aa, Severe acute respiratory syndrome coronavirus 2
SLATVAYFN

SEQ ID NO: 6412 - protein, 10 aa, Severe acute respiratory syndrome coronavirus 2
SLATVAYFNM

SEQ ID NO: 6413 - protein, 9 aa, Severe acute respiratory syndrome coronavirus 2
ATVAYFNMV

SEQ ID NO: 6414 - protein, 10 aa, Severe acute respiratory syndrome coronavirus 2
ATVAYFNMVY

SEQ ID NO: 6415 - protein, 9 aa, Severe acute respiratory syndrome coronavirus 2
TVAYFNMVY

SEQ ID NO: 6416 - protein, 10 aa, Severe acute respiratory syndrome coronavirus 2
TVAYFNMVYM

SEQ ID NO: 6417 - protein, 9 aa, Severe acute respiratory syndrome coronavirus 2
AYFNMVYMP

SEQ ID NO: 6418 - protein, 10 aa, Severe acute respiratory syndrome coronavirus 2
AYFNMVYMPA

SEQ ID NO: 6419 - protein, 10 aa, Severe acute respiratory syndrome coronavirus 2
FNMVYMPASW

SEQ ID NO: 6420 - protein, 9 aa, Severe acute respiratory syndrome coronavirus 2
NMVYMPASW

SEQ ID NO: 6421 - protein, 10 aa, Severe acute respiratory syndrome coronavirus 2
NMVYMPASWV

SEQ ID NO: 6422 - protein, 9 aa, Severe acute respiratory syndrome coronavirus 2
MVYMPASWV

SEQ ID NO: 6423 - protein, 10 aa, Severe acute respiratory syndrome coronavirus 2
MVYMPASWVM

SEQ ID NO: 6424 - protein, 9 aa, Severe acute respiratory syndrome coronavirus 2
VYMPASWVM

SEQ ID NO: 6425 - protein, 10 aa, Severe acute respiratory syndrome coronavirus 2
VYMPASWVMR

SEQ ID NO: 6426 - protein, 10 aa, Severe acute respiratory syndrome coronavirus 2
YMPASWVMRI

SEQ ID NO: 6427 - protein, 9 aa, Severe acute respiratory syndrome coronavirus 2
MPASWVMRI

SEQ ID NO: 6428 - protein, 10 aa, Severe acute respiratory syndrome coronavirus 2
MPASWVMRIM

SEQ ID NO: 6429 - protein, 10 aa, Severe acute respiratory syndrome coronavirus 2
ASWVMRIMTW

SEQ ID NO: 6430 - protein, 9 aa, Severe acute respiratory syndrome coronavirus 2
SWVMRIMTW

SEQ ID NO: 6431 - protein, 10 aa, Severe acute respiratory syndrome coronavirus 2
SWVMRIMTWL

SEQ ID NO: 6432 - protein, 9 aa, Severe acute respiratory syndrome coronavirus 2
WVMRIMTWL

SEQ ID NO: 6433 - protein, 10 aa, Severe acute respiratory syndrome coronavirus 2
WVMRIMTWLD

SEQ ID NO: 6434 - protein, 10 aa, Severe acute respiratory syndrome coronavirus 2
VMRIMTWLDM

SEQ ID NO: 6435 - protein, 10 aa, Severe acute respiratory syndrome coronavirus 2
MRIMTWLDMV

SEQ ID NO: 6436 - protein, 9 aa, Severe acute respiratory syndrome coronavirus 2
RIMTWLDMV

SEQ ID NO: 6437 - protein, 10 aa, Severe acute respiratory syndrome coronavirus 2
RIMTWLDMVD

SEQ ID NO: 6438 - protein, 10 aa, Severe acute respiratory syndrome coronavirus 2
IMTWLDMVDT

SEQ ID NO: 6439 - protein, 9 aa, Severe acute respiratory syndrome coronavirus 2
TWLDMVDTS

SEQ ID NO: 6440 - protein, 10 aa, Severe acute respiratory syndrome coronavirus 2
TWLDMVDTSL

SEQ ID NO: 6441 - protein, 9 aa, Severe acute respiratory syndrome coronavirus 2
WLDMVDTSL

SEQ ID NO: 6442 - protein, 10 aa, Severe acute respiratory syndrome coronavirus 2
WLDMVDTSLS

SEQ ID NO: 6443 - protein, 10 aa, Severe acute respiratory syndrome coronavirus 2
MVDTSLSGFK

SEQ ID NO: 6444 - protein, 9 aa, Severe acute respiratory syndrome coronavirus 2
DTSLSGFKL

SEQ ID NO: 6445 - protein, 10 aa, Severe acute respiratory syndrome coronavirus 2
DTSLSGFKLK

SEQ ID NO: 6446 - protein, 9 aa, Severe acute respiratory syndrome coronavirus 2
TSLSGFKLK

SEQ ID NO: 6447 - protein, 9 aa, Severe acute respiratory syndrome coronavirus 2
KLKDCVMYA

SEQ ID NO: 6448 - protein, 10 aa, Severe acute respiratory syndrome coronavirus 2
KLKDCVMYAS

SEQ ID NO: 6449 - protein, 9 aa, Severe acute respiratory syndrome coronavirus 2
CVMYASAVV

SEQ ID NO: 6450 - protein, 9 aa, Severe acute respiratory syndrome coronavirus 2
VMYASAVVL

SEQ ID NO: 6451 - protein, 10 aa, Severe acute respiratory syndrome coronavirus 2
VMYASAVVLL

SEQ ID NO: 6452 - protein, 10 aa, Severe acute respiratory syndrome coronavirus 2
MYASAVVLLI

SEQ ID NO: 6453 - protein, 10 aa, Severe acute respiratory syndrome coronavirus 2
YASAVVLLIL

SEQ ID NO: 6454 - protein, 9 aa, Severe acute respiratory syndrome coronavirus 2
SAVVLLILM

SEQ ID NO: 6455 - protein, 10 aa, Severe acute respiratory syndrome coronavirus 2
AVVLLILMTA

SEQ ID NO: 6456 - protein, 9 aa, Severe acute respiratory syndrome coronavirus 2
VVLLILMTA

SEQ ID NO: 6457 - protein, 10 aa, Severe acute respiratory syndrome coronavirus 2
VVLLILMTAR

SEQ ID NO: 6458 - protein, 9 aa, Severe acute respiratory syndrome coronavirus 2
VLLILMTAR

SEQ ID NO: 6459 - protein, 10 aa, Severe acute respiratory syndrome coronavirus 2
VLLILMTART

SEQ ID NO: 6460 - protein, 9 aa, Severe acute respiratory syndrome coronavirus 2
LLILMTART

SEQ ID NO: 6461 - protein, 10 aa, Severe acute respiratory syndrome coronavirus 2
LLILMTARTV

SEQ ID NO: 6462 - protein, 10 aa, Severe acute respiratory syndrome coronavirus 2
LILMTARTVY

SEQ ID NO: 6463 - protein, 9 aa, Severe acute respiratory syndrome coronavirus 2
ILMTARTVY

SEQ ID NO: 6464 - protein, 10 aa, Severe acute respiratory syndrome coronavirus 2
ILMTARTVYD

SEQ ID NO: 6465 - protein, 9 aa, Severe acute respiratory syndrome coronavirus 2
TVYDDGARR

SEQ ID NO: 6466 - protein, 10 aa, Severe acute respiratory syndrome coronavirus 2
VYDDGARRVW

SEQ ID NO: 6467 - protein, 9 aa, Severe acute respiratory syndrome coronavirus 2
DGARRVWTL

SEQ ID NO: 6468 - protein, 9 aa, Severe acute respiratory syndrome coronavirus 2
GARRVWTLM

SEQ ID NO: 6469 - protein, 9 aa, Severe acute respiratory syndrome coronavirus 2
RVWTLMNVL

SEQ ID NO: 6470 - protein, 10 aa, Severe acute respiratory syndrome coronavirus 2
VWTLMNVLTL

SEQ ID NO: 6471 - protein, 9 aa, Severe acute respiratory syndrome coronavirus 2
WTLMNVLTL

SEQ ID NO: 6472 - protein, 10 aa, Severe acute respiratory syndrome coronavirus 2
WTLMNVLTLV

SEQ ID NO: 6473 - protein, 10 aa, Severe acute respiratory syndrome coronavirus 2
TLMNVLTLVY

SEQ ID NO: 6474 - protein, 9 aa, Severe acute respiratory syndrome coronavirus 2
LMNVLTLVY

SEQ ID NO: 6475 - protein, 10 aa, Severe acute respiratory syndrome coronavirus 2
LMNVLTLVYK

SEQ ID NO: 6476 - protein, 9 aa, Severe acute respiratory syndrome coronavirus 2
NVLTLVYKV

SEQ ID NO: 6477 - protein, 10 aa, Severe acute respiratory syndrome coronavirus 2
NVLTLVYKVY

SEQ ID NO: 6478 - protein, 10 aa, Severe acute respiratory syndrome coronavirus 2
VLTLVYKVYY

SEQ ID NO: 6479 - protein, 9 aa, Severe acute respiratory syndrome coronavirus 2
LTLVYKVYY

SEQ ID NO: 6480 - protein, 10 aa, Severe acute respiratory syndrome coronavirus 2
VYKVYYGNAL

SEQ ID NO: 6481 - protein, 9 aa, Severe acute respiratory syndrome coronavirus 2
YKVYYGNAL

SEQ ID NO: 6482 - protein, 9 aa, Severe acute respiratory syndrome coronavirus 2
KVYYGNALD

SEQ ID NO: 6483 - protein, 10 aa, Severe acute respiratory syndrome coronavirus 2
YYGNALDQAI

SEQ ID NO: 6484 - protein, 10 aa, Severe acute respiratory syndrome coronavirus 2
ALDQAISMWA

SEQ ID NO: 6485 - protein, 9 aa, Severe acute respiratory syndrome coronavirus 2
DQAISMWAL

SEQ ID NO: 6486 - protein, 10 aa, Severe acute respiratory syndrome coronavirus 2
DQAISMWALI

SEQ ID NO: 6487 - protein, 9 aa, Severe acute respiratory syndrome coronavirus 2
QAISMWALI

SEQ ID NO: 6488 - protein, 9 aa, Severe acute respiratory syndrome coronavirus 2
AISMWALII

SEQ ID NO: 6489 - protein, 10 aa, Severe acute respiratory syndrome coronavirus 2
ISMWALIISV

SEQ ID NO: 6490 - protein, 9 aa, Severe acute respiratory syndrome coronavirus 2
SMWALIISV

SEQ ID NO: 6491 - protein, 10 aa, Severe acute respiratory syndrome coronavirus 2
SMWALIISVT

SEQ ID NO: 6492 - protein, 10 aa, Severe acute respiratory syndrome coronavirus 2
MWALIISVTS

SEQ ID NO: 6493 - protein, 10 aa, Severe acute respiratory syndrome coronavirus 2
ALIISVTSNY

SEQ ID NO: 6494 - protein, 9 aa, Severe acute respiratory syndrome coronavirus 2
LIISVTSNY

SEQ ID NO: 6495 - protein, 9 aa, Severe acute respiratory syndrome coronavirus 2
SVTSNYSGV

SEQ ID NO: 6496 - protein, 10 aa, Severe acute respiratory syndrome coronavirus 2
SVTSNYSGVV

SEQ ID NO: 6497 - protein, 9 aa, Severe acute respiratory syndrome coronavirus 2
VTSNYSGVV

SEQ ID NO: 6498 - protein, 10 aa, Severe acute respiratory syndrome coronavirus 2
SNYSGVVTTV

SEQ ID NO: 6499 - protein, 9 aa, Severe acute respiratory syndrome coronavirus 2
NYSGVVTTV

SEQ ID NO: 6500 - protein, 10 aa, Severe acute respiratory syndrome coronavirus 2
NYSGVVTTVM

SEQ ID NO: 6501 - protein, 10 aa, Severe acute respiratory syndrome coronavirus 2
YSGVVTTVMF

SEQ ID NO: 6502 - protein, 10 aa, Severe acute respiratory syndrome coronavirus 2
SGVVTTVMFL

SEQ ID NO: 6503 - protein, 9 aa, Severe acute respiratory syndrome coronavirus 2
GVVTTVMFL

SEQ ID NO: 6504 - protein, 10 aa, Severe acute respiratory syndrome coronavirus 2
GVVTTVMFLA

SEQ ID NO: 6505 - protein, 9 aa, Severe acute respiratory syndrome coronavirus 2
VVTTVMFLA

SEQ ID NO: 6506 - protein, 10 aa, Severe acute respiratory syndrome coronavirus 2
VVTTVMFLAR

SEQ ID NO: 6507 - protein, 9 aa, Severe acute respiratory syndrome coronavirus 2
VTTVMFLAR

SEQ ID NO: 6508 - protein, 10 aa, Severe acute respiratory syndrome coronavirus 2
TVMFLARGIV

SEQ ID NO: 6509 - protein, 10 aa, Severe acute respiratory syndrome coronavirus 2
VMFLARGIVF

SEQ ID NO: 6510 - protein, 9 aa, Severe acute respiratory syndrome coronavirus 2
MFLARGIVF

SEQ ID NO: 6511 - protein, 9 aa, Severe acute respiratory syndrome coronavirus 2
FLARGIVFM

SEQ ID NO: 6512 - protein, 10 aa, Severe acute respiratory syndrome coronavirus 2
FLARGIVFMC

SEQ ID NO: 6513 - protein, 10 aa, Severe acute respiratory syndrome coronavirus 2
LARGIVFMCV

SEQ ID NO: 6514 - protein, 10 aa, Severe acute respiratory syndrome coronavirus 2
RGIVFMCVEY

SEQ ID NO: 6515 - protein, 9 aa, Severe acute respiratory syndrome coronavirus 2
GIVFMCVEY

SEQ ID NO: 6516 - protein, 10 aa, Severe acute respiratory syndrome coronavirus 2
IVFMCVEYCP

SEQ ID NO: 6517 - protein, 10 aa, Severe acute respiratory syndrome coronavirus 2
VFMCVEYCPI

SEQ ID NO: 6518 - protein, 9 aa, Severe acute respiratory syndrome coronavirus 2
FMCVEYCPI

SEQ ID NO: 6519 - protein, 10 aa, Severe acute respiratory syndrome coronavirus 2
FMCVEYCPIF

SEQ ID NO: 6520 - protein, 10 aa, Severe acute respiratory syndrome coronavirus 2
MCVEYCPIFF

SEQ ID NO: 6521 - protein, 9 aa, Severe acute respiratory syndrome coronavirus 2
CVEYCPIFF

SEQ ID NO: 6522 - protein, 10 aa, Severe acute respiratory syndrome coronavirus 2
CVEYCPIFFI

SEQ ID NO: 6523 - protein, 9 aa, Severe acute respiratory syndrome coronavirus 2
VEYCPIFFI

SEQ ID NO: 6524 - protein, 10 aa, Severe acute respiratory syndrome coronavirus 2
VEYCPIFFIT

SEQ ID NO: 6525 - protein, 10 aa, Severe acute respiratory syndrome coronavirus 2
EYCPIFFITG

SEQ ID NO: 6526 - protein, 10 aa, Severe acute respiratory syndrome coronavirus 2
PIFFITGNTL

SEQ ID NO: 6527 - protein, 9 aa, Severe acute respiratory syndrome coronavirus 2
IFFITGNTL

SEQ ID NO: 6528 - protein, 10 aa, Severe acute respiratory syndrome coronavirus 2
IFFITGNTLQ

SEQ ID NO: 6529 - protein, 10 aa, Severe acute respiratory syndrome coronavirus 2
FITGNTLQCI

SEQ ID NO: 6530 - protein, 9 aa, Severe acute respiratory syndrome coronavirus 2
ITGNTLQCI

SEQ ID NO: 6531 - protein, 9 aa, Severe acute respiratory syndrome coronavirus 2
NTLQCIMLV

SEQ ID NO: 6532 - protein, 10 aa, Severe acute respiratory syndrome coronavirus 2
NTLQCIMLVY

SEQ ID NO: 6533 - protein, 9 aa, Severe acute respiratory syndrome coronavirus 2
TLQCIMLVY

SEQ ID NO: 6534 - protein, 10 aa, Severe acute respiratory syndrome coronavirus 2
TLQCIMLVYC

SEQ ID NO: 6535 - protein, 10 aa, Severe acute respiratory syndrome coronavirus 2
LQCIMLVYCF

SEQ ID NO: 6536 - protein, 9 aa, Severe acute respiratory syndrome coronavirus 2
QCIMLVYCF

SEQ ID NO: 6537 - protein, 9 aa, Severe acute respiratory syndrome coronavirus 2
CIMLVYCFL

SEQ ID NO: 6538 - protein, 10 aa, Severe acute respiratory syndrome coronavirus 2
CIMLVYCFLG

SEQ ID NO: 6539 - protein, 9 aa, Severe acute respiratory syndrome coronavirus 2
IMLVYCFLG

SEQ ID NO: 6540 - protein, 10 aa, Severe acute respiratory syndrome coronavirus 2
IMLVYCFLGY

SEQ ID NO: 6541 - protein, 9 aa, Severe acute respiratory syndrome coronavirus 2
MLVYCFLGY

SEQ ID NO: 6542 - protein, 10 aa, Severe acute respiratory syndrome coronavirus 2
MLVYCFLGYF

SEQ ID NO: 6543 - protein, 10 aa, Severe acute respiratory syndrome coronavirus 2
LVYCFLGYFC

SEQ ID NO: 6544 - protein, 10 aa, Severe acute respiratory syndrome coronavirus 2
VYCFLGYFCT

SEQ ID NO: 6545 - protein, 9 aa, Severe acute respiratory syndrome coronavirus 2
CFLGYFCTC

SEQ ID NO: 6546 - protein, 10 aa, Severe acute respiratory syndrome coronavirus 2
CFLGYFCTCY

SEQ ID NO: 6547 - protein, 9 aa, Severe acute respiratory syndrome coronavirus 2
FLGYFCTCY

SEQ ID NO: 6548 - protein, 10 aa, Severe acute respiratory syndrome coronavirus 2
FLGYFCTCYF

SEQ ID NO: 6549 - protein, 9 aa, Severe acute respiratory syndrome coronavirus 2
LGYFCTCYF

SEQ ID NO: 6550 - protein, 10 aa, Severe acute respiratory syndrome coronavirus 2
GYFCTCYFGL

SEQ ID NO: 6551 - protein, 9 aa, Severe acute respiratory syndrome coronavirus 2
YFCTCYFGL

SEQ ID NO: 6552 - protein, 10 aa, Severe acute respiratory syndrome coronavirus 2
YFCTCYFGLF

SEQ ID NO: 6553 - protein, 9 aa, Severe acute respiratory syndrome coronavirus 2
FCTCYFGLF

SEQ ID NO: 6554 - protein, 9 aa, Severe acute respiratory syndrome coronavirus 2
CTCYFGLFC

SEQ ID NO: 6555 - protein, 10 aa, Severe acute respiratory syndrome coronavirus 2
CTCYFGLFCL

SEQ ID NO: 6556 - protein, 9 aa, Severe acute respiratory syndrome coronavirus 2
TCYFGLFCL

SEQ ID NO: 6557 - protein, 10 aa, Severe acute respiratory syndrome coronavirus 2
TCYFGLFCLL

SEQ ID NO: 6558 - protein, 10 aa, Severe acute respiratory syndrome coronavirus 2
CYFGLFCLLN

SEQ ID NO: 6559 - protein, 9 aa, Severe acute respiratory syndrome coronavirus 2
GLFCLLNRY

SEQ ID NO: 6560 - protein, 10 aa, Severe acute respiratory syndrome coronavirus 2
GLFCLLNRYF

SEQ ID NO: 6561 - protein, 10 aa, Severe acute respiratory syndrome coronavirus 2
LFCLLNRYFR

SEQ ID NO: 6562 - protein, 9 aa, Severe acute respiratory syndrome coronavirus 2
CLLNRYFRL

SEQ ID NO: 6563 - protein, 10 aa, Severe acute respiratory syndrome coronavirus 2
CLLNRYFRLT

SEQ ID NO: 6564 - protein, 10 aa, Severe acute respiratory syndrome coronavirus 2
LLNRYFRLTL

SEQ ID NO: 6565 - protein, 9 aa, Severe acute respiratory syndrome coronavirus 2
LNRYFRLTL

SEQ ID NO: 6566 - protein, 9 aa, Severe acute respiratory syndrome coronavirus 2
RYFRLTLGV

SEQ ID NO: 6567 - protein, 10 aa, Severe acute respiratory syndrome coronavirus 2
RYFRLTLGVY

SEQ ID NO: 6568 - protein, 9 aa, Severe acute respiratory syndrome coronavirus 2
RLTLGVYDY

SEQ ID NO: 6569 - protein, 10 aa, Severe acute respiratory syndrome coronavirus 2
RLTLGVYDYL

SEQ ID NO: 6570 - protein, 9 aa, Severe acute respiratory syndrome coronavirus 2
LTLGVYDYL

SEQ ID NO: 6571 - protein, 10 aa, Severe acute respiratory syndrome coronavirus 2
LTLGVYDYLV

SEQ ID NO: 6572 - protein, 9 aa, Severe acute respiratory syndrome coronavirus 2
TLGVYDYLV

SEQ ID NO: 6573 - protein, 9 aa, Severe acute respiratory syndrome coronavirus 2
GVYDYLVST

SEQ ID NO: 6574 - protein, 9 aa, Severe acute respiratory syndrome coronavirus 2
VYDYLVSTQ

SEQ ID NO: 6575 - protein, 10 aa, Severe acute respiratory syndrome coronavirus 2
YDYLVSTQEF

SEQ ID NO: 6576 - protein, 9 aa, Severe acute respiratory syndrome coronavirus 2
DYLVSTQEF

SEQ ID NO: 6577 - protein, 10 aa, Severe acute respiratory syndrome coronavirus 2
DYLVSTQEFR

SEQ ID NO: 6578 - protein, 10 aa, Severe acute respiratory syndrome coronavirus 2
YLVSTQEFRY

SEQ ID NO: 6579 - protein, 9 aa, Severe acute respiratory syndrome coronavirus 2
LVSTQEFRY

SEQ ID NO: 6580 - protein, 10 aa, Severe acute respiratory syndrome coronavirus 2
STQEFRYMNS

SEQ ID NO: 6581 - protein, 10 aa, Severe acute respiratory syndrome coronavirus 2
QEFRYMNSQG

SEQ ID NO: 6582 - protein, 10 aa, Severe acute respiratory syndrome coronavirus 2
EFRYMNSQGL

SEQ ID NO: 6583 - protein, 9 aa, Severe acute respiratory syndrome coronavirus 2
RYMNSQGLL

SEQ ID NO: 6584 - protein, 10 aa, Severe acute respiratory syndrome coronavirus 2
RYMNSQGLLP

SEQ ID NO: 6585 - protein, 9 aa, Severe acute respiratory syndrome coronavirus 2
GLLPPKNSI

SEQ ID NO: 6586 - protein, 10 aa, Severe acute respiratory syndrome coronavirus 2
GLLPPKNSID

SEQ ID NO: 6587 - protein, 9 aa, Severe acute respiratory syndrome coronavirus 2
LPPKNSIDA

SEQ ID NO: 6588 - protein, 10 aa, Severe acute respiratory syndrome coronavirus 2
LPPKNSIDAF

SEQ ID NO: 6589 - protein, 9 aa, Severe acute respiratory syndrome coronavirus 2
PPKNSIDAF

SEQ ID NO: 6590 - protein, 10 aa, Severe acute respiratory syndrome coronavirus 2
SIDAFKLNIK

SEQ ID NO: 6591 - protein, 9 aa, Severe acute respiratory syndrome coronavirus 2
AFKLNIKLL

SEQ ID NO: 6592 - protein, 10 aa, Severe acute respiratory syndrome coronavirus 2
FKLNIKLLGV

SEQ ID NO: 6593 - protein, 9 aa, Severe acute respiratory syndrome coronavirus 2
KLNIKLLGV

SEQ ID NO: 6594 - protein, 10 aa, Severe acute respiratory syndrome coronavirus 2
NIKLLGVGGK

SEQ ID NO: 6595 - protein, 10 aa, Severe acute respiratory syndrome coronavirus 2
LLGVGGKPCI

SEQ ID NO: 6596 - protein, 9 aa, Severe acute respiratory syndrome coronavirus 2
GVGGKPCIK

SEQ ID NO: 6597 - protein, 9 aa, Severe acute respiratory syndrome coronavirus 2
KPCIKVATV

SEQ ID NO: 6598 - protein, 10 aa, Severe acute respiratory syndrome coronavirus 2
KPCIKVATVQ

SEQ ID NO: 6599 - protein, 9 aa, Severe acute respiratory syndrome coronavirus 2
SKMSDVKCT

SEQ ID NO: 6600 - protein, 10 aa, Severe acute respiratory syndrome coronavirus 2
KMSDVKCTSV

SEQ ID NO: 6601 - protein, 9 aa, Severe acute respiratory syndrome coronavirus 2
MSDVKCTSV

SEQ ID NO: 6602 - protein, 10 aa, Severe acute respiratory syndrome coronavirus 2
MSDVKCTSVV

SEQ ID NO: 6603 - protein, 10 aa, Severe acute respiratory syndrome coronavirus 2
SDVKCTSVVL

SEQ ID NO: 6604 - protein, 10 aa, Severe acute respiratory syndrome coronavirus 2
KCTSVVLLSV

SEQ ID NO: 6605 - protein, 10 aa, Severe acute respiratory syndrome coronavirus 2
VLLSVLQQLR

SEQ ID NO: 6606 - protein, 10 aa, Severe acute respiratory syndrome coronavirus 2
LLSVLQQLRV

SEQ ID NO: 6607 - protein, 10 aa, Severe acute respiratory syndrome coronavirus 2
QQLRVESSSK

SEQ ID NO: 6608 - protein, 9 aa, Severe acute respiratory syndrome coronavirus 2
QLRVESSSK

SEQ ID NO: 6609 - protein, 10 aa, Severe acute respiratory syndrome coronavirus 2
RVESSSKLWA

SEQ ID NO: 6610 - protein, 10 aa, Severe acute respiratory syndrome coronavirus 2
VESSSKLWAQ

SEQ ID NO: 6611 - protein, 9 aa, Severe acute respiratory syndrome coronavirus 2
KLWAQCVQL

SEQ ID NO: 6612 - protein, 9 aa, Severe acute respiratory syndrome coronavirus 2
LWAQCVQLH

SEQ ID NO: 6613 - protein, 10 aa, Severe acute respiratory syndrome coronavirus 2
LWAQCVQLHN

SEQ ID NO: 6614 - protein, 10 aa, Severe acute respiratory syndrome coronavirus 2
AQCVQLHNDI

SEQ ID NO: 6615 - protein, 10 aa, Severe acute respiratory syndrome coronavirus 2
QLHNDILLAK

SEQ ID NO: 6616 - protein, 10 aa, Severe acute respiratory syndrome coronavirus 2
ILLAKDTTEA

SEQ ID NO: 6617 - protein, 9 aa, Severe acute respiratory syndrome coronavirus 2
LLAKDTTEA

SEQ ID NO: 6618 - protein, 10 aa, Severe acute respiratory syndrome coronavirus 2
LLAKDTTEAF

SEQ ID NO: 6619 - protein, 9 aa, Severe acute respiratory syndrome coronavirus 2
LAKDTTEAF

SEQ ID NO: 6620 - protein, 9 aa, Severe acute respiratory syndrome coronavirus 2
KDTTEAFEK

SEQ ID NO: 6621 - protein, 9 aa, Severe acute respiratory syndrome coronavirus 2
TTEAFEKMV

SEQ ID NO: 6622 - protein, 10 aa, Severe acute respiratory syndrome coronavirus 2
TTEAFEKMVS

SEQ ID NO: 6623 - protein, 10 aa, Severe acute respiratory syndrome coronavirus 2
TEAFEKMVSL

SEQ ID NO: 6624 - protein, 10 aa, Severe acute respiratory syndrome coronavirus 2
EAFEKMVSLL

SEQ ID NO: 6625 - protein, 10 aa, Severe acute respiratory syndrome coronavirus 2
FEKMVSLLSV

SEQ ID NO: 6626 - protein, 10 aa, Severe acute respiratory syndrome coronavirus 2
EKMVSLLSVL

SEQ ID NO: 6627 - protein, 10 aa, Severe acute respiratory syndrome coronavirus 2
KMVSLLSVLL

SEQ ID NO: 6628 - protein, 10 aa, Severe acute respiratory syndrome coronavirus 2
SLLSVLLSMQ

SEQ ID NO: 6629 - protein, 9 aa, Severe acute respiratory syndrome coronavirus 2
VLLSMQGAV

SEQ ID NO: 6630 - protein, 10 aa, Severe acute respiratory syndrome coronavirus 2
SMQGAVDINK

SEQ ID NO: 6631 - protein, 9 aa, Severe acute respiratory syndrome coronavirus 2
AVDINKLCE

SEQ ID NO: 6632 - protein, 10 aa, Severe acute respiratory syndrome coronavirus 2
AVDINKLCEE

SEQ ID NO: 6633 - protein, 10 aa, Severe acute respiratory syndrome coronavirus 2
KLCEEMLDNR

SEQ ID NO: 6634 - protein, 9 aa, Severe acute respiratory syndrome coronavirus 2
EEMLDNRAT

SEQ ID NO: 6635 - protein, 10 aa, Severe acute respiratory syndrome coronavirus 2
EEMLDNRATL

SEQ ID NO: 6636 - protein, 9 aa, Severe acute respiratory syndrome coronavirus 2
EMLDNRATL

SEQ ID NO: 6637 - protein, 9 aa, Severe acute respiratory syndrome coronavirus 2
AIASEFSSL

SEQ ID NO: 6638 - protein, 10 aa, Severe acute respiratory syndrome coronavirus 2
ASEFSSLPSY

SEQ ID NO: 6639 - protein, 10 aa, Severe acute respiratory syndrome coronavirus 2
SEFSSLPSYA

SEQ ID NO: 6640 - protein, 9 aa, Severe acute respiratory syndrome coronavirus 2
FSSLPSYAA

SEQ ID NO: 6641 - protein, 10 aa, Severe acute respiratory syndrome coronavirus 2
FSSLPSYAAF

SEQ ID NO: 6642 - protein, 9 aa, Severe acute respiratory syndrome coronavirus 2
SSLPSYAAF

SEQ ID NO: 6643 - protein, 9 aa, Severe acute respiratory syndrome coronavirus 2
SLPSYAAFA

SEQ ID NO: 6644 - protein, 10 aa, Severe acute respiratory syndrome coronavirus 2
SLPSYAAFAT

SEQ ID NO: 6645 - protein, 9 aa, Severe acute respiratory syndrome coronavirus 2
LPSYAAFAT

SEQ ID NO: 6646 - protein, 10 aa, Severe acute respiratory syndrome coronavirus 2
LPSYAAFATA

SEQ ID NO: 6647 - protein, 9 aa, Severe acute respiratory syndrome coronavirus 2
AVANGDSEV

SEQ ID NO: 6648 - protein, 10 aa, Severe acute respiratory syndrome coronavirus 2
AVANGDSEVV

SEQ ID NO: 6649 - protein, 10 aa, Severe acute respiratory syndrome coronavirus 2
NGDSEVVLKK

SEQ ID NO: 6650 - protein, 10 aa, Severe acute respiratory syndrome coronavirus 2
DSEVVLKKLK

SEQ ID NO: 6651 - protein, 9 aa, Severe acute respiratory syndrome coronavirus 2
KLKKSLNVA

SEQ ID NO: 6652 - protein, 10 aa, Severe acute respiratory syndrome coronavirus 2
KLKKSLNVAK

SEQ ID NO: 6653 - protein, 10 aa, Severe acute respiratory syndrome coronavirus 2
KSLNVAKSEF

SEQ ID NO: 6654 - protein, 10 aa, Severe acute respiratory syndrome coronavirus 2
KSEFDRDAAM

SEQ ID NO: 6655 - protein, 9 aa, Severe acute respiratory syndrome coronavirus 2
SEFDRDAAM

SEQ ID NO: 6656 - protein, 10 aa, Severe acute respiratory syndrome coronavirus 2
SEFDRDAAMQ

SEQ ID NO: 6657 - protein, 9 aa, Severe acute respiratory syndrome coronavirus 2
RDAAMQRKL

SEQ ID NO: 6658 - protein, 9 aa, Severe acute respiratory syndrome coronavirus 2
AAMQRKLEK

SEQ ID NO: 6659 - protein, 9 aa, Severe acute respiratory syndrome coronavirus 2
LEKMADQAM

SEQ ID NO: 6660 - protein, 9 aa, Severe acute respiratory syndrome coronavirus 2
KMADQAMTQ

SEQ ID NO: 6661 - protein, 10 aa, Severe acute respiratory syndrome coronavirus 2
KMADQAMTQM

SEQ ID NO: 6662 - protein, 10 aa, Severe acute respiratory syndrome coronavirus 2
MADQAMTQMY

SEQ ID NO: 6663 - protein, 9 aa, Severe acute respiratory syndrome coronavirus 2
ADQAMTQMY

SEQ ID NO: 6664 - protein, 10 aa, Severe acute respiratory syndrome coronavirus 2
ADQAMTQMYK

SEQ ID NO: 6665 - protein, 9 aa, Severe acute respiratory syndrome coronavirus 2
DQAMTQMYK

SEQ ID NO: 6666 - protein, 9 aa, Severe acute respiratory syndrome coronavirus 2
MTQMYKQAR

SEQ ID NO: 6667 - protein, 9 aa, Severe acute respiratory syndrome coronavirus 2
MYKQARSED

SEQ ID NO: 6668 - protein, 9 aa, Severe acute respiratory syndrome coronavirus 2
RSEDKRAKV

SEQ ID NO: 6669 - protein, 9 aa, Severe acute respiratory syndrome coronavirus 2
KVTSAMQTM

SEQ ID NO: 6670 - protein, 10 aa, Severe acute respiratory syndrome coronavirus 2
KVTSAMQTML

SEQ ID NO: 6671 - protein, 9 aa, Severe acute respiratory syndrome coronavirus 2
VTSAMQTML

SEQ ID NO: 6672 - protein, 10 aa, Severe acute respiratory syndrome coronavirus 2
VTSAMQTMLF

SEQ ID NO: 6673 - protein, 9 aa, Severe acute respiratory syndrome coronavirus 2
TSAMQTMLF

SEQ ID NO: 6674 - protein, 10 aa, Severe acute respiratory syndrome coronavirus 2
SAMQTMLFTM

SEQ ID NO: 6675 - protein, 9 aa, Severe acute respiratory syndrome coronavirus 2
AMQTMLFTM

SEQ ID NO: 6676 - protein, 10 aa, Severe acute respiratory syndrome coronavirus 2
AMQTMLFTML

SEQ ID NO: 6677 - protein, 9 aa, Severe acute respiratory syndrome coronavirus 2
MQTMLFTML

SEQ ID NO: 6678 - protein, 10 aa, Severe acute respiratory syndrome coronavirus 2
MQTMLFTMLR

SEQ ID NO: 6679 - protein, 9 aa, Severe acute respiratory syndrome coronavirus 2
QTMLFTMLR

SEQ ID NO: 6680 - protein, 10 aa, Severe acute respiratory syndrome coronavirus 2
QTMLFTMLRK

SEQ ID NO: 6681 - protein, 9 aa, Severe acute respiratory syndrome coronavirus 2
TMLFTMLRK

SEQ ID NO: 6682 - protein, 10 aa, Severe acute respiratory syndrome coronavirus 2
TMLFTMLRKL

SEQ ID NO: 6683 - protein, 9 aa, Severe acute respiratory syndrome coronavirus 2
MLFTMLRKL

SEQ ID NO: 6684 - protein, 10 aa, Severe acute respiratory syndrome coronavirus 2
FTMLRKLDND

SEQ ID NO: 6685 - protein, 10 aa, Severe acute respiratory syndrome coronavirus 2
KLDNDALNNI

SEQ ID NO: 6686 - protein, 9 aa, Severe acute respiratory syndrome coronavirus 2
ALNNIINNA

SEQ ID NO: 6687 - protein, 10 aa, Severe acute respiratory syndrome coronavirus 2
ALNNIINNAR

SEQ ID NO: 6688 - protein, 9 aa, Severe acute respiratory syndrome coronavirus 2
NARDGCVPL

SEQ ID NO: 6689 - protein, 10 aa, Severe acute respiratory syndrome coronavirus 2
RDGCVPLNII

SEQ ID NO: 6690 - protein, 9 aa, Severe acute respiratory syndrome coronavirus 2
CVPLNIIPL

SEQ ID NO: 6691 - protein, 10 aa, Severe acute respiratory syndrome coronavirus 2
NIIPLTTAAK

SEQ ID NO: 6692 - protein, 9 aa, Severe acute respiratory syndrome coronavirus 2
IIPLTTAAK

SEQ ID NO: 6693 - protein, 9 aa, Severe acute respiratory syndrome coronavirus 2
IPLTTAAKL

SEQ ID NO: 6694 - protein, 10 aa, Severe acute respiratory syndrome coronavirus 2
IPLTTAAKLM

SEQ ID NO: 6695 - protein, 9 aa, Severe acute respiratory syndrome coronavirus 2
LTTAAKLMV

SEQ ID NO: 6696 - protein, 10 aa, Severe acute respiratory syndrome coronavirus 2
LTTAAKLMVV

SEQ ID NO: 6697 - protein, 9 aa, Severe acute respiratory syndrome coronavirus 2
TTAAKLMVV

SEQ ID NO: 6698 - protein, 9 aa, Severe acute respiratory syndrome coronavirus 2
KLMVVIPDY

SEQ ID NO: 6699 - protein, 10 aa, Severe acute respiratory syndrome coronavirus 2
KLMVVIPDYN

SEQ ID NO: 6700 - protein, 10 aa, Severe acute respiratory syndrome coronavirus 2
MVVIPDYNTY

SEQ ID NO: 6701 - protein, 9 aa, Severe acute respiratory syndrome coronavirus 2
VVIPDYNTY

SEQ ID NO: 6702 - protein, 10 aa, Severe acute respiratory syndrome coronavirus 2
VVIPDYNTYK

SEQ ID NO: 6703 - protein, 9 aa, Severe acute respiratory syndrome coronavirus 2
VIPDYNTYK

SEQ ID NO: 6704 - protein, 9 aa, Severe acute respiratory syndrome coronavirus 2
NTYKNTCDG

SEQ ID NO: 6705 - protein, 9 aa, Severe acute respiratory syndrome coronavirus 2
TYKNTCDGT

SEQ ID NO: 6706 - protein, 10 aa, Severe acute respiratory syndrome coronavirus 2
TYKNTCDGTT

SEQ ID NO: 6707 - protein, 10 aa, Severe acute respiratory syndrome coronavirus 2
YKNTCDGTTF

SEQ ID NO: 6708 - protein, 9 aa, Severe acute respiratory syndrome coronavirus 2
KNTCDGTTF

SEQ ID NO: 6709 - protein, 9 aa, Severe acute respiratory syndrome coronavirus 2
NTCDGTTFT

SEQ ID NO: 6710 - protein, 10 aa, Severe acute respiratory syndrome coronavirus 2
NTCDGTTFTY

SEQ ID NO: 6711 - protein, 10 aa, Severe acute respiratory syndrome coronavirus 2
TCDGTTFTYA

SEQ ID NO: 6712 - protein, 9 aa, Severe acute respiratory syndrome coronavirus 2
TTFTYASAL

SEQ ID NO: 6713 - protein, 10 aa, Severe acute respiratory syndrome coronavirus 2
TTFTYASALW

SEQ ID NO: 6714 - protein, 9 aa, Severe acute respiratory syndrome coronavirus 2
TFTYASALW

SEQ ID NO: 6715 - protein, 9 aa, Severe acute respiratory syndrome coronavirus 2
FTYASALWE

SEQ ID NO: 6716 - protein, 10 aa, Severe acute respiratory syndrome coronavirus 2
FTYASALWEI

SEQ ID NO: 6717 - protein, 9 aa, Severe acute respiratory syndrome coronavirus 2
TYASALWEI

SEQ ID NO: 6718 - protein, 9 aa, Severe acute respiratory syndrome coronavirus 2
ALWEIQQVV

SEQ ID NO: 6719 - protein, 10 aa, Severe acute respiratory syndrome coronavirus 2
VVDADSKIVQ

SEQ ID NO: 6720 - protein, 9 aa, Severe acute respiratory syndrome coronavirus 2
IVQLSEISM

SEQ ID NO: 6721 - protein, 9 aa, Severe acute respiratory syndrome coronavirus 2
LSEISMDNS

SEQ ID NO: 6722 - protein, 10 aa, Severe acute respiratory syndrome coronavirus 2
LSEISMDNSP

SEQ ID NO: 6723 - protein, 9 aa, Severe acute respiratory syndrome coronavirus 2
SEISMDNSP

SEQ ID NO: 6724 - protein, 10 aa, Severe acute respiratory syndrome coronavirus 2
SEISMDNSPN

SEQ ID NO: 6725 - protein, 9 aa, Severe acute respiratory syndrome coronavirus 2
ISMDNSPNL

SEQ ID NO: 6726 - protein, 10 aa, Severe acute respiratory syndrome coronavirus 2
ISMDNSPNLA

SEQ ID NO: 6727 - protein, 9 aa, Severe acute respiratory syndrome coronavirus 2
SMDNSPNLA

SEQ ID NO: 6728 - protein, 10 aa, Severe acute respiratory syndrome coronavirus 2
SMDNSPNLAW

SEQ ID NO: 6729 - protein, 9 aa, Severe acute respiratory syndrome coronavirus 2
MDNSPNLAW

SEQ ID NO: 6730 - protein, 9 aa, Severe acute respiratory syndrome coronavirus 2
NSPNLAWPL

SEQ ID NO: 6731 - protein, 9 aa, Severe acute respiratory syndrome coronavirus 2
SPNLAWPLI

SEQ ID NO: 6732 - protein, 10 aa, Severe acute respiratory syndrome coronavirus 2
SPNLAWPLIV

SEQ ID NO: 6733 - protein, 10 aa, Severe acute respiratory syndrome coronavirus 2
NLAWPLIVTA

SEQ ID NO: 6734 - protein, 10 aa, Severe acute respiratory syndrome coronavirus 2
LAWPLIVTAL

SEQ ID NO: 6735 - protein, 9 aa, Severe acute respiratory syndrome coronavirus 2
AWPLIVTAL

SEQ ID NO: 6736 - protein, 10 aa, Severe acute respiratory syndrome coronavirus 2
AWPLIVTALR

SEQ ID NO: 6737 - protein, 10 aa, Severe acute respiratory syndrome coronavirus 2
WPLIVTALRA

SEQ ID NO: 6738 - protein, 10 aa, Severe acute respiratory syndrome coronavirus 2
TALRANSAVK

SEQ ID NO: 6739 - protein, 9 aa, Severe acute respiratory syndrome coronavirus 2
ALRANSAVK

SEQ ID NO: 6740 - protein, 9 aa, Severe acute respiratory syndrome coronavirus 2
NELSPVALR

SEQ ID NO: 6741 - protein, 9 aa, Severe acute respiratory syndrome coronavirus 2
SPVALRQMS

SEQ ID NO: 6742 - protein, 10 aa, Severe acute respiratory syndrome coronavirus 2
SPVALRQMSC

SEQ ID NO: 6743 - protein, 9 aa, Severe acute respiratory syndrome coronavirus 2
CTDDNALAY

SEQ ID NO: 6744 - protein, 10 aa, Severe acute respiratory syndrome coronavirus 2
CTDDNALAYY

SEQ ID NO: 6745 - protein, 9 aa, Severe acute respiratory syndrome coronavirus 2
TDDNALAYY

SEQ ID NO: 6746 - protein, 10 aa, Severe acute respiratory syndrome coronavirus 2
NALAYYNTTK

SEQ ID NO: 6747 - protein, 9 aa, Severe acute respiratory syndrome coronavirus 2
ALAYYNTTK

SEQ ID NO: 6748 - protein, 10 aa, Severe acute respiratory syndrome coronavirus 2
ALAYYNTTKG

SEQ ID NO: 6749 - protein, 10 aa, Severe acute respiratory syndrome coronavirus 2
YYNTTKGGRF

SEQ ID NO: 6750 - protein, 10 aa, Severe acute respiratory syndrome coronavirus 2
NTTKGGRFVL

SEQ ID NO: 6751 - protein, 9 aa, Severe acute respiratory syndrome coronavirus 2
TTKGGRFVL

SEQ ID NO: 6752 - protein, 10 aa, Severe acute respiratory syndrome coronavirus 2
RFVLALLSDL

SEQ ID NO: 6753 - protein, 9 aa, Severe acute respiratory syndrome coronavirus 2
FVLALLSDL

SEQ ID NO: 6754 - protein, 9 aa, Severe acute respiratory syndrome coronavirus 2
ALLSDLQDL

SEQ ID NO: 6755 - protein, 10 aa, Severe acute respiratory syndrome coronavirus 2
ALLSDLQDLK

SEQ ID NO: 6756 - protein, 9 aa, Severe acute respiratory syndrome coronavirus 2
LLSDLQDLK

SEQ ID NO: 6757 - protein, 10 aa, Severe acute respiratory syndrome coronavirus 2
LLSDLQDLKW

SEQ ID NO: 6758 - protein, 9 aa, Severe acute respiratory syndrome coronavirus 2
LSDLQDLKW

SEQ ID NO: 6759 - protein, 10 aa, Severe acute respiratory syndrome coronavirus 2
LSDLQDLKWA

SEQ ID NO: 6760 - protein, 9 aa, Severe acute respiratory syndrome coronavirus 2
SDLQDLKWA

SEQ ID NO: 6761 - protein, 10 aa, Severe acute respiratory syndrome coronavirus 2
DLQDLKWARF

SEQ ID NO: 6762 - protein, 10 aa, Severe acute respiratory syndrome coronavirus 2
QDLKWARFPK

SEQ ID NO: 6763 - protein, 9 aa, Severe acute respiratory syndrome coronavirus 2
DLKWARFPK

SEQ ID NO: 6764 - protein, 9 aa, Severe acute respiratory syndrome coronavirus 2
KWARFPKSD

SEQ ID NO: 6765 - protein, 9 aa, Severe acute respiratory syndrome coronavirus 2
FPKSDGTGT

SEQ ID NO: 6766 - protein, 10 aa, Severe acute respiratory syndrome coronavirus 2
FPKSDGTGTI

SEQ ID NO: 6767 - protein, 9 aa, Severe acute respiratory syndrome coronavirus 2
KSDGTGTIY

SEQ ID NO: 6768 - protein, 10 aa, Severe acute respiratory syndrome coronavirus 2
KSDGTGTIYT

SEQ ID NO: 6769 - protein, 9 aa, Severe acute respiratory syndrome coronavirus 2
YTELEPPCR

SEQ ID NO: 6770 - protein, 10 aa, Severe acute respiratory syndrome coronavirus 2
YTELEPPCRF

SEQ ID NO: 6771 - protein, 9 aa, Severe acute respiratory syndrome coronavirus 2
TELEPPCRF

SEQ ID NO: 6772 - protein, 9 aa, Severe acute respiratory syndrome coronavirus 2
CRFVTDTPK

SEQ ID NO: 6773 - protein, 10 aa, Severe acute respiratory syndrome coronavirus 2
FVTDTPKGPK

SEQ ID NO: 6774 - protein, 9 aa, Severe acute respiratory syndrome coronavirus 2
VTDTPKGPK

SEQ ID NO: 6775 - protein, 10 aa, Severe acute respiratory syndrome coronavirus 2
VTDTPKGPKV

SEQ ID NO: 6776 - protein, 10 aa, Severe acute respiratory syndrome coronavirus 2
DTPKGPKVKY

SEQ ID NO: 6777 - protein, 10 aa, Severe acute respiratory syndrome coronavirus 2
TPKGPKVKYL

SEQ ID NO: 6778 - protein, 10 aa, Severe acute respiratory syndrome coronavirus 2
KGPKVKYLYF

SEQ ID NO: 6779 - protein, 9 aa, Severe acute respiratory syndrome coronavirus 2
GPKVKYLYF

SEQ ID NO: 6780 - protein, 10 aa, Severe acute respiratory syndrome coronavirus 2
GPKVKYLYFI

SEQ ID NO: 6781 - protein, 9 aa, Severe acute respiratory syndrome coronavirus 2
KVKYLYFIK

SEQ ID NO: 6782 - protein, 9 aa, Severe acute respiratory syndrome coronavirus 2
KYLYFIKGL

SEQ ID NO: 6783 - protein, 10 aa, Severe acute respiratory syndrome coronavirus 2
KYLYFIKGLN

SEQ ID NO: 6784 - protein, 10 aa, Severe acute respiratory syndrome coronavirus 2
YLYFIKGLNN

SEQ ID NO: 6785 - protein, 10 aa, Severe acute respiratory syndrome coronavirus 2
LYFIKGLNNL

SEQ ID NO: 6786 - protein, 9 aa, Severe acute respiratory syndrome coronavirus 2
YFIKGLNNL

SEQ ID NO: 6787 - protein, 10 aa, Severe acute respiratory syndrome coronavirus 2
FIKGLNNLNR

SEQ ID NO: 6788 - protein, 10 aa, Severe acute respiratory syndrome coronavirus 2
GLNNLNRGMV

SEQ ID NO: 6789 - protein, 10 aa, Severe acute respiratory syndrome coronavirus 2
MVLGSLAATV

SEQ ID NO: 6790 - protein, 10 aa, Severe acute respiratory syndrome coronavirus 2
SADAQSFLNR

SEQ ID NO: 6791 - protein, 9 aa, Severe acute respiratory syndrome coronavirus 2
SFLNRVCGV

SEQ ID NO: 6792 - protein, 10 aa, Severe acute respiratory syndrome coronavirus 2
FLNRVCGVSA

SEQ ID NO: 6793 - protein, 9 aa, Severe acute respiratory syndrome coronavirus 2
RVCGVSAAR

SEQ ID NO: 6794 - protein, 10 aa, Severe acute respiratory syndrome coronavirus 2
TPCGTGTSTD

SEQ ID NO: 6795 - protein, 9 aa, Severe acute respiratory syndrome coronavirus 2
GTGTSTDVV

SEQ ID NO: 6796 - protein, 10 aa, Severe acute respiratory syndrome coronavirus 2
GTGTSTDVVY

SEQ ID NO: 6797 - protein, 9 aa, Severe acute respiratory syndrome coronavirus 2
GTSTDVVYR

SEQ ID NO: 6798 - protein, 10 aa, Severe acute respiratory syndrome coronavirus 2
TSTDVVYRAF

SEQ ID NO: 6799 - protein, 9 aa, Severe acute respiratory syndrome coronavirus 2
STDVVYRAF

SEQ ID NO: 6800 - protein, 10 aa, Severe acute respiratory syndrome coronavirus 2
STDVVYRAFD

SEQ ID NO: 6801 - protein, 10 aa, Severe acute respiratory syndrome coronavirus 2
TDVVYRAFDI

SEQ ID NO: 6802 - protein, 10 aa, Severe acute respiratory syndrome coronavirus 2
DVVYRAFDIY

SEQ ID NO: 6803 - protein, 9 aa, Severe acute respiratory syndrome coronavirus 2
VVYRAFDIY

SEQ ID NO: 6804 - protein, 10 aa, Severe acute respiratory syndrome coronavirus 2
VYRAFDIYND

SEQ ID NO: 6805 - protein, 9 aa, Severe acute respiratory syndrome coronavirus 2
RAFDIYNDK

SEQ ID NO: 6806 - protein, 9 aa, Severe acute respiratory syndrome coronavirus 2
IYNDKVAGF

SEQ ID NO: 6807 - protein, 10 aa, Severe acute respiratory syndrome coronavirus 2
IYNDKVAGFA

SEQ ID NO: 6808 - protein, 10 aa, Severe acute respiratory syndrome coronavirus 2
NDKVAGFAKF

SEQ ID NO: 6809 - protein, 9 aa, Severe acute respiratory syndrome coronavirus 2
KVAGFAKFL

SEQ ID NO: 6810 - protein, 10 aa, Severe acute respiratory syndrome coronavirus 2
KVAGFAKFLK

SEQ ID NO: 6811 - protein, 9 aa, Severe acute respiratory syndrome coronavirus 2
VAGFAKFLK

SEQ ID NO: 6812 - protein, 10 aa, Severe acute respiratory syndrome coronavirus 2
AKFLKTNCCR

SEQ ID NO: 6813 - protein, 10 aa, Severe acute respiratory syndrome coronavirus 2
KFLKTNCCRF

SEQ ID NO: 6814 - protein, 9 aa, Severe acute respiratory syndrome coronavirus 2
FLKTNCCRF

SEQ ID NO: 6815 - protein, 9 aa, Severe acute respiratory syndrome coronavirus 2
KTNCCRFQE

SEQ ID NO: 6816 - protein, 10 aa, Severe acute respiratory syndrome coronavirus 2
KTNCCRFQEK

SEQ ID NO: 6817 - protein, 9 aa, Severe acute respiratory syndrome coronavirus 2
TNCCRFQEK

SEQ ID NO: 6818 - protein, 9 aa, Severe acute respiratory syndrome coronavirus 2
QEKDEDDNL

SEQ ID NO: 6819 - protein, 10 aa, Severe acute respiratory syndrome coronavirus 2
QEKDEDDNLI

SEQ ID NO: 6820 - protein, 10 aa, Severe acute respiratory syndrome coronavirus 2
DEDDNLIDSY

SEQ ID NO: 6821 - protein, 9 aa, Severe acute respiratory syndrome coronavirus 2
EDDNLIDSY

SEQ ID NO: 6822 - protein, 10 aa, Severe acute respiratory syndrome coronavirus 2
EDDNLIDSYF

SEQ ID NO: 6823 - protein, 9 aa, Severe acute respiratory syndrome coronavirus 2
DDNLIDSYF

SEQ ID NO: 6824 - protein, 9 aa, Severe acute respiratory syndrome coronavirus 2
NLIDSYFVV

SEQ ID NO: 6825 - protein, 10 aa, Severe acute respiratory syndrome coronavirus 2
NLIDSYFVVK

SEQ ID NO: 6826 - protein, 9 aa, Severe acute respiratory syndrome coronavirus 2
LIDSYFVVK

SEQ ID NO: 6827 - protein, 10 aa, Severe acute respiratory syndrome coronavirus 2
LIDSYFVVKR

SEQ ID NO: 6828 - protein, 10 aa, Severe acute respiratory syndrome coronavirus 2
SYFVVKRHTF

SEQ ID NO: 6829 - protein, 9 aa, Severe acute respiratory syndrome coronavirus 2
YFVVKRHTF

SEQ ID NO: 6830 - protein, 10 aa, Severe acute respiratory syndrome coronavirus 2
YFVVKRHTFS

SEQ ID NO: 6831 - protein, 10 aa, Severe acute respiratory syndrome coronavirus 2
VVKRHTFSNY

SEQ ID NO: 6832 - protein, 10 aa, Severe acute respiratory syndrome coronavirus 2
HTFSNYQHEE

SEQ ID NO: 6833 - protein, 10 aa, Severe acute respiratory syndrome coronavirus 2
TFSNYQHEET

SEQ ID NO: 6834 - protein, 10 aa, Severe acute respiratory syndrome coronavirus 2
SNYQHEETIY

SEQ ID NO: 6835 - protein, 10 aa, Severe acute respiratory syndrome coronavirus 2
YQHEETIYNL

SEQ ID NO: 6836 - protein, 9 aa, Severe acute respiratory syndrome coronavirus 2
HEETIYNLL

SEQ ID NO: 6837 - protein, 10 aa, Severe acute respiratory syndrome coronavirus 2
HEETIYNLLK

SEQ ID NO: 6838 - protein, 9 aa, Severe acute respiratory syndrome coronavirus 2
EETIYNLLK

SEQ ID NO: 6839 - protein, 10 aa, Severe acute respiratory syndrome coronavirus 2
YNLLKDCPAV

SEQ ID NO: 6840 - protein, 9 aa, Severe acute respiratory syndrome coronavirus 2
NLLKDCPAV

SEQ ID NO: 6841 - protein, 10 aa, Severe acute respiratory syndrome coronavirus 2
NLLKDCPAVA

SEQ ID NO: 6842 - protein, 9 aa, Severe acute respiratory syndrome coronavirus 2
LLKDCPAVA

SEQ ID NO: 6843 - protein, 10 aa, Severe acute respiratory syndrome coronavirus 2
LLKDCPAVAK

SEQ ID NO: 6844 - protein, 9 aa, Severe acute respiratory syndrome coronavirus 2
CPAVAKHDF

SEQ ID NO: 6845 - protein, 10 aa, Severe acute respiratory syndrome coronavirus 2
CPAVAKHDFF

SEQ ID NO: 6846 - protein, 10 aa, Severe acute respiratory syndrome coronavirus 2
PAVAKHDFFK

SEQ ID NO: 6847 - protein, 9 aa, Severe acute respiratory syndrome coronavirus 2
AVAKHDFFK

SEQ ID NO: 6848 - protein, 9 aa, Severe acute respiratory syndrome coronavirus 2
VAKHDFFKF

SEQ ID NO: 6849 - protein, 10 aa, Severe acute respiratory syndrome coronavirus 2
FFKFRIDGDM

SEQ ID NO: 6850 - protein, 9 aa, Severe acute respiratory syndrome coronavirus 2
IDGDMVPHI

SEQ ID NO: 6851 - protein, 9 aa, Severe acute respiratory syndrome coronavirus 2
MVPHISRQR

SEQ ID NO: 6852 - protein, 9 aa, Severe acute respiratory syndrome coronavirus 2
VPHISRQRL

SEQ ID NO: 6853 - protein, 9 aa, Severe acute respiratory syndrome coronavirus 2
HISRQRLTK

SEQ ID NO: 6854 - protein, 10 aa, Severe acute respiratory syndrome coronavirus 2
HISRQRLTKY

SEQ ID NO: 6855 - protein, 9 aa, Severe acute respiratory syndrome coronavirus 2
ISRQRLTKY

SEQ ID NO: 6856 - protein, 10 aa, Severe acute respiratory syndrome coronavirus 2
SRQRLTKYTM

SEQ ID NO: 6857 - protein, 9 aa, Severe acute respiratory syndrome coronavirus 2
RQRLTKYTM

SEQ ID NO: 6858 - protein, 9 aa, Severe acute respiratory syndrome coronavirus 2
RLTKYTMAD

SEQ ID NO: 6859 - protein, 10 aa, Severe acute respiratory syndrome coronavirus 2
RLTKYTMADL

SEQ ID NO: 6860 - protein, 9 aa, Severe acute respiratory syndrome coronavirus 2
LTKYTMADL

SEQ ID NO: 6861 - protein, 9 aa, Severe acute respiratory syndrome coronavirus 2
KYTMADLVY

SEQ ID NO: 6862 - protein, 9 aa, Severe acute respiratory syndrome coronavirus 2
YTMADLVYA

SEQ ID NO: 6863 - protein, 10 aa, Severe acute respiratory syndrome coronavirus 2
YTMADLVYAL

SEQ ID NO: 6864 - protein, 9 aa, Severe acute respiratory syndrome coronavirus 2
TMADLVYAL

SEQ ID NO: 6865 - protein, 10 aa, Severe acute respiratory syndrome coronavirus 2
TMADLVYALR

SEQ ID NO: 6866 - protein, 10 aa, Severe acute respiratory syndrome coronavirus 2
MADLVYALRH

SEQ ID NO: 6867 - protein, 9 aa, Severe acute respiratory syndrome coronavirus 2
ADLVYALRH

SEQ ID NO: 6868 - protein, 10 aa, Severe acute respiratory syndrome coronavirus 2
ADLVYALRHF

SEQ ID NO: 6869 - protein, 9 aa, Severe acute respiratory syndrome coronavirus 2
DLVYALRHF

SEQ ID NO: 6870 - protein, 9 aa, Severe acute respiratory syndrome coronavirus 2
VYALRHFDE

SEQ ID NO: 6871 - protein, 10 aa, Severe acute respiratory syndrome coronavirus 2
NCDTLKEILV

SEQ ID NO: 6872 - protein, 10 aa, Severe acute respiratory syndrome coronavirus 2
DTLKEILVTY

SEQ ID NO: 6873 - protein, 9 aa, Severe acute respiratory syndrome coronavirus 2
TLKEILVTY

SEQ ID NO: 6874 - protein, 9 aa, Severe acute respiratory syndrome coronavirus 2
KEILVTYNC

SEQ ID NO: 6875 - protein, 10 aa, Severe acute respiratory syndrome coronavirus 2
KEILVTYNCC

SEQ ID NO: 6876 - protein, 9 aa, Severe acute respiratory syndrome coronavirus 2
ILVTYNCCD

SEQ ID NO: 6877 - protein, 10 aa, Severe acute respiratory syndrome coronavirus 2
VTYNCCDDDY

SEQ ID NO: 6878 - protein, 9 aa, Severe acute respiratory syndrome coronavirus 2
TYNCCDDDY

SEQ ID NO: 6879 - protein, 10 aa, Severe acute respiratory syndrome coronavirus 2
TYNCCDDDYF

SEQ ID NO: 6880 - protein, 9 aa, Severe acute respiratory syndrome coronavirus 2
CCDDDYFNK

SEQ ID NO: 6881 - protein, 10 aa, Severe acute respiratory syndrome coronavirus 2
CCDDDYFNKK

SEQ ID NO: 6882 - protein, 9 aa, Severe acute respiratory syndrome coronavirus 2
CDDDYFNKK

SEQ ID NO: 6883 - protein, 10 aa, Severe acute respiratory syndrome coronavirus 2
DDYFNKKDWY

SEQ ID NO: 6884 - protein, 9 aa, Severe acute respiratory syndrome coronavirus 2
DYFNKKDWY

SEQ ID NO: 6885 - protein, 9 aa, Severe acute respiratory syndrome coronavirus 2
YFNKKDWYD

SEQ ID NO: 6886 - protein, 10 aa, Severe acute respiratory syndrome coronavirus 2
YFNKKDWYDF

SEQ ID NO: 6887 - protein, 10 aa, Severe acute respiratory syndrome coronavirus 2
DWYDFVENPD

SEQ ID NO: 6888 - protein, 10 aa, Severe acute respiratory syndrome coronavirus 2
WYDFVENPDI

SEQ ID NO: 6889 - protein, 10 aa, Severe acute respiratory syndrome coronavirus 2
FVENPDILRV

SEQ ID NO: 6890 - protein, 9 aa, Severe acute respiratory syndrome coronavirus 2
VENPDILRV

SEQ ID NO: 6891 - protein, 10 aa, Severe acute respiratory syndrome coronavirus 2
VENPDILRVY

SEQ ID NO: 6892 - protein, 10 aa, Severe acute respiratory syndrome coronavirus 2
NPDILRVYAN

SEQ ID NO: 6893 - protein, 9 aa, Severe acute respiratory syndrome coronavirus 2
RVYANLGER

SEQ ID NO: 6894 - protein, 9 aa, Severe acute respiratory syndrome coronavirus 2
VYANLGERV

SEQ ID NO: 6895 - protein, 9 aa, Severe acute respiratory syndrome coronavirus 2
GERVRQALL

SEQ ID NO: 6896 - protein, 9 aa, Severe acute respiratory syndrome coronavirus 2
RVRQALLKT

SEQ ID NO: 6897 - protein, 10 aa, Severe acute respiratory syndrome coronavirus 2
RQALLKTVQF

SEQ ID NO: 6898 - protein, 9 aa, Severe acute respiratory syndrome coronavirus 2
QALLKTVQF

SEQ ID NO: 6899 - protein, 9 aa, Severe acute respiratory syndrome coronavirus 2
ALLKTVQFC

SEQ ID NO: 6900 - protein, 10 aa, Severe acute respiratory syndrome coronavirus 2
KTVQFCDAMR

SEQ ID NO: 6901 - protein, 9 aa, Severe acute respiratory syndrome coronavirus 2
FCDAMRNAG

SEQ ID NO: 6902 - protein, 10 aa, Severe acute respiratory syndrome coronavirus 2
AMRNAGIVGV

SEQ ID NO: 6903 - protein, 9 aa, Severe acute respiratory syndrome coronavirus 2
RNAGIVGVL

SEQ ID NO: 6904 - protein, 9 aa, Severe acute respiratory syndrome coronavirus 2
AGIVGVLTL

SEQ ID NO: 6905 - protein, 10 aa, Severe acute respiratory syndrome coronavirus 2
LTLDNQDLNG

SEQ ID NO: 6906 - protein, 10 aa, Severe acute respiratory syndrome coronavirus 2
TLDNQDLNGN

SEQ ID NO: 6907 - protein, 10 aa, Severe acute respiratory syndrome coronavirus 2
LDNQDLNGNW

SEQ ID NO: 6908 - protein, 10 aa, Severe acute respiratory syndrome coronavirus 2
DNQDLNGNWY

SEQ ID NO: 6909 - protein, 9 aa, Severe acute respiratory syndrome coronavirus 2
NQDLNGNWY

SEQ ID NO: 6910 - protein, 10 aa, Severe acute respiratory syndrome coronavirus 2
NQDLNGNWYD

SEQ ID NO: 6911 - protein, 9 aa, Severe acute respiratory syndrome coronavirus 2
DLNGNWYDF

SEQ ID NO: 6912 - protein, 9 aa, Severe acute respiratory syndrome coronavirus 2
NWYDFGDFI

SEQ ID NO: 6913 - protein, 10 aa, Severe acute respiratory syndrome coronavirus 2
NWYDFGDFIQ

SEQ ID NO: 6914 - protein, 10 aa, Severe acute respiratory syndrome coronavirus 2
FIQTTPGSGV

SEQ ID NO: 6915 - protein, 9 aa, Severe acute respiratory syndrome coronavirus 2
TTPGSGVPV

SEQ ID NO: 6916 - protein, 10 aa, Severe acute respiratory syndrome coronavirus 2
TPGSGVPVVD

SEQ ID NO: 6917 - protein, 10 aa, Severe acute respiratory syndrome coronavirus 2
GSGVPVVDSY

SEQ ID NO: 6918 - protein, 10 aa, Severe acute respiratory syndrome coronavirus 2
SGVPVVDSYY

SEQ ID NO: 6919 - protein, 9 aa, Severe acute respiratory syndrome coronavirus 2
GVPVVDSYY

SEQ ID NO: 6920 - protein, 10 aa, Severe acute respiratory syndrome coronavirus 2
VPVVDSYYSL

SEQ ID NO: 6921 - protein, 9 aa, Severe acute respiratory syndrome coronavirus 2
VVDSYYSLL

SEQ ID NO: 6922 - protein, 10 aa, Severe acute respiratory syndrome coronavirus 2
VVDSYYSLLM

SEQ ID NO: 6923 - protein, 9 aa, Severe acute respiratory syndrome coronavirus 2
SYYSLLMPI

SEQ ID NO: 6924 - protein, 10 aa, Severe acute respiratory syndrome coronavirus 2
SYYSLLMPIL

SEQ ID NO: 6925 - protein, 9 aa, Severe acute respiratory syndrome coronavirus 2
YYSLLMPIL

SEQ ID NO: 6926 - protein, 10 aa, Severe acute respiratory syndrome coronavirus 2
YYSLLMPILT

SEQ ID NO: 6927 - protein, 10 aa, Severe acute respiratory syndrome coronavirus 2
YSLLMPILTL

SEQ ID NO: 6928 - protein, 9 aa, Severe acute respiratory syndrome coronavirus 2
SLLMPILTL

SEQ ID NO: 6929 - protein, 10 aa, Severe acute respiratory syndrome coronavirus 2
SLLMPILTLT

SEQ ID NO: 6930 - protein, 9 aa, Severe acute respiratory syndrome coronavirus 2
LLMPILTLT

SEQ ID NO: 6931 - protein, 10 aa, Severe acute respiratory syndrome coronavirus 2
LLMPILTLTR

SEQ ID NO: 6932 - protein, 10 aa, Severe acute respiratory syndrome coronavirus 2
LMPILTLTRA

SEQ ID NO: 6933 - protein, 9 aa, Severe acute respiratory syndrome coronavirus 2
MPILTLTRA

SEQ ID NO: 6934 - protein, 10 aa, Severe acute respiratory syndrome coronavirus 2
MPILTLTRAL

SEQ ID NO: 6935 - protein, 10 aa, Severe acute respiratory syndrome coronavirus 2
ILTLTRALTA

SEQ ID NO: 6936 - protein, 9 aa, Severe acute respiratory syndrome coronavirus 2
LTAESHVDT

SEQ ID NO: 6937 - protein, 10 aa, Severe acute respiratory syndrome coronavirus 2
LTAESHVDTD

SEQ ID NO: 6938 - protein, 9 aa, Severe acute respiratory syndrome coronavirus 2
AESHVDTDL

SEQ ID NO: 6939 - protein, 10 aa, Severe acute respiratory syndrome coronavirus 2
AESHVDTDLT

SEQ ID NO: 6940 - protein, 10 aa, Severe acute respiratory syndrome coronavirus 2
ESHVDTDLTK

SEQ ID NO: 6941 - protein, 10 aa, Severe acute respiratory syndrome coronavirus 2
HVDTDLTKPY

SEQ ID NO: 6942 - protein, 9 aa, Severe acute respiratory syndrome coronavirus 2
VDTDLTKPY

SEQ ID NO: 6943 - protein, 9 aa, Severe acute respiratory syndrome coronavirus 2
DTDLTKPYI

SEQ ID NO: 6944 - protein, 10 aa, Severe acute respiratory syndrome coronavirus 2
DTDLTKPYIK

SEQ ID NO: 6945 - protein, 10 aa, Severe acute respiratory syndrome coronavirus 2
LTKPYIKWDL

SEQ ID NO: 6946 - protein, 9 aa, Severe acute respiratory syndrome coronavirus 2
KPYIKWDLL

SEQ ID NO: 6947 - protein, 10 aa, Severe acute respiratory syndrome coronavirus 2
KPYIKWDLLK

SEQ ID NO: 6948 - protein, 9 aa, Severe acute respiratory syndrome coronavirus 2
PYIKWDLLK

SEQ ID NO: 6949 - protein, 10 aa, Severe acute respiratory syndrome coronavirus 2
PYIKWDLLKY

SEQ ID NO: 6950 - protein, 9 aa, Severe acute respiratory syndrome coronavirus 2
YIKWDLLKY

SEQ ID NO: 6951 - protein, 9 aa, Severe acute respiratory syndrome coronavirus 2
KWDLLKYDF

SEQ ID NO: 6952 - protein, 9 aa, Severe acute respiratory syndrome coronavirus 2
KYDFTEERL

SEQ ID NO: 6953 - protein, 9 aa, Severe acute respiratory syndrome coronavirus 2
FTEERLKLF

SEQ ID NO: 6954 - protein, 10 aa, Severe acute respiratory syndrome coronavirus 2
FTEERLKLFD

SEQ ID NO: 6955 - protein, 10 aa, Severe acute respiratory syndrome coronavirus 2
TEERLKLFDR

SEQ ID NO: 6956 - protein, 10 aa, Severe acute respiratory syndrome coronavirus 2
EERLKLFDRY

SEQ ID NO: 6957 - protein, 10 aa, Severe acute respiratory syndrome coronavirus 2
ERLKLFDRYF

SEQ ID NO: 6958 - protein, 9 aa, Severe acute respiratory syndrome coronavirus 2
RLKLFDRYF

SEQ ID NO: 6959 - protein, 10 aa, Severe acute respiratory syndrome coronavirus 2
RLKLFDRYFK

SEQ ID NO: 6960 - protein, 9 aa, Severe acute respiratory syndrome coronavirus 2
KLFDRYFKY

SEQ ID NO: 6961 - protein, 10 aa, Severe acute respiratory syndrome coronavirus 2
KLFDRYFKYW

SEQ ID NO: 6962 - protein, 9 aa, Severe acute respiratory syndrome coronavirus 2
LFDRYFKYW

SEQ ID NO: 6963 - protein, 9 aa, Severe acute respiratory syndrome coronavirus 2
RYFKYWDQT

SEQ ID NO: 6964 - protein, 10 aa, Severe acute respiratory syndrome coronavirus 2
RYFKYWDQTY

SEQ ID NO: 6965 - protein, 9 aa, Severe acute respiratory syndrome coronavirus 2
YFKYWDQTY

SEQ ID NO: 6966 - protein, 10 aa, Severe acute respiratory syndrome coronavirus 2
YFKYWDQTYH

SEQ ID NO: 6967 - protein, 10 aa, Severe acute respiratory syndrome coronavirus 2
YWDQTYHPNC

SEQ ID NO: 6968 - protein, 9 aa, Severe acute respiratory syndrome coronavirus 2
TYHPNCVNC

SEQ ID NO: 6969 - protein, 10 aa, Severe acute respiratory syndrome coronavirus 2
TYHPNCVNCL

SEQ ID NO: 6970 - protein, 9 aa, Severe acute respiratory syndrome coronavirus 2
YHPNCVNCL

SEQ ID NO: 6971 - protein, 10 aa, Severe acute respiratory syndrome coronavirus 2
HPNCVNCLDD

SEQ ID NO: 6972 - protein, 9 aa, Severe acute respiratory syndrome coronavirus 2
CLDDRCILH

SEQ ID NO: 6973 - protein, 10 aa, Severe acute respiratory syndrome coronavirus 2
CLDDRCILHC

SEQ ID NO: 6974 - protein, 9 aa, Severe acute respiratory syndrome coronavirus 2
RCILHCANF

SEQ ID NO: 6975 - protein, 10 aa, Severe acute respiratory syndrome coronavirus 2
CILHCANFNV

SEQ ID NO: 6976 - protein, 9 aa, Severe acute respiratory syndrome coronavirus 2
ILHCANFNV

SEQ ID NO: 6977 - protein, 10 aa, Severe acute respiratory syndrome coronavirus 2
ILHCANFNVL

SEQ ID NO: 6978 - protein, 10 aa, Severe acute respiratory syndrome coronavirus 2
LHCANFNVLF

SEQ ID NO: 6979 - protein, 9 aa, Severe acute respiratory syndrome coronavirus 2
HCANFNVLF

SEQ ID NO: 6980 - protein, 10 aa, Severe acute respiratory syndrome coronavirus 2
ANFNVLFSTV

SEQ ID NO: 6981 - protein, 9 aa, Severe acute respiratory syndrome coronavirus 2
NFNVLFSTV

SEQ ID NO: 6982 - protein, 10 aa, Severe acute respiratory syndrome coronavirus 2
NFNVLFSTVF

SEQ ID NO: 6983 - protein, 9 aa, Severe acute respiratory syndrome coronavirus 2
VLFSTVFPP

SEQ ID NO: 6984 - protein, 10 aa, Severe acute respiratory syndrome coronavirus 2
VLFSTVFPPT

SEQ ID NO: 6985 - protein, 10 aa, Severe acute respiratory syndrome coronavirus 2
LFSTVFPPTS

SEQ ID NO: 6986 - protein, 10 aa, Severe acute respiratory syndrome coronavirus 2
FSTVFPPTSF

SEQ ID NO: 6987 - protein, 10 aa, Severe acute respiratory syndrome coronavirus 2
STVFPPTSFG

SEQ ID NO: 6988 - protein, 9 aa, Severe acute respiratory syndrome coronavirus 2
TVFPPTSFG

SEQ ID NO: 6989 - protein, 10 aa, Severe acute respiratory syndrome coronavirus 2
TVFPPTSFGP

SEQ ID NO: 6990 - protein, 9 aa, Severe acute respiratory syndrome coronavirus 2
VFPPTSFGP

SEQ ID NO: 6991 - protein, 10 aa, Severe acute respiratory syndrome coronavirus 2
VFPPTSFGPL

SEQ ID NO: 6992 - protein, 9 aa, Severe acute respiratory syndrome coronavirus 2
FPPTSFGPL

SEQ ID NO: 6993 - protein, 10 aa, Severe acute respiratory syndrome coronavirus 2
FPPTSFGPLV

SEQ ID NO: 6994 - protein, 10 aa, Severe acute respiratory syndrome coronavirus 2
PTSFGPLVRK

SEQ ID NO: 6995 - protein, 9 aa, Severe acute respiratory syndrome coronavirus 2
TSFGPLVRK

SEQ ID NO: 6996 - protein, 10 aa, Severe acute respiratory syndrome coronavirus 2
SFGPLVRKIF

SEQ ID NO: 6997 - protein, 9 aa, Severe acute respiratory syndrome coronavirus 2
GPLVRKIFV

SEQ ID NO: 6998 - protein, 10 aa, Severe acute respiratory syndrome coronavirus 2
RKIFVDGVPF

SEQ ID NO: 6999 - protein, 10 aa, Severe acute respiratory syndrome coronavirus 2
KIFVDGVPFV

SEQ ID NO: 7000 - protein, 10 aa, Severe acute respiratory syndrome coronavirus 2
IFVDGVPFVV

SEQ ID NO: 7001 - protein, 9 aa, Severe acute respiratory syndrome coronavirus 2
FVDGVPFVV

SEQ ID NO: 7002 - protein, 10 aa, Severe acute respiratory syndrome coronavirus 2
FVDGVPFVVS

SEQ ID NO: 7003 - protein, 10 aa, Severe acute respiratory syndrome coronavirus 2
GVPFVVSTGY

SEQ ID NO: 7004 - protein, 9 aa, Severe acute respiratory syndrome coronavirus 2
VPFVVSTGY

SEQ ID NO: 7005 - protein, 10 aa, Severe acute respiratory syndrome coronavirus 2
PFVVSTGYHF

SEQ ID NO: 7006 - protein, 9 aa, Severe acute respiratory syndrome coronavirus 2
FVVSTGYHF

SEQ ID NO: 7007 - protein, 10 aa, Severe acute respiratory syndrome coronavirus 2
FVVSTGYHFR

SEQ ID NO: 7008 - protein, 9 aa, Severe acute respiratory syndrome coronavirus 2
VVSTGYHFR

SEQ ID NO: 7009 - protein, 9 aa, Severe acute respiratory syndrome coronavirus 2
STGYHFREL

SEQ ID NO: 7010 - protein, 9 aa, Severe acute respiratory syndrome coronavirus 2
NQDVNLHSS

SEQ ID NO: 7011 - protein, 10 aa, Severe acute respiratory syndrome coronavirus 2
QDVNLHSSRL

SEQ ID NO: 7012 - protein, 10 aa, Severe acute respiratory syndrome coronavirus 2
VNLHSSRLSF

SEQ ID NO: 7013 - protein, 10 aa, Severe acute respiratory syndrome coronavirus 2
NLHSSRLSFK

SEQ ID NO: 7014 - protein, 9 aa, Severe acute respiratory syndrome coronavirus 2
SSRLSFKEL

SEQ ID NO: 7015 - protein, 10 aa, Severe acute respiratory syndrome coronavirus 2
SSRLSFKELL

SEQ ID NO: 7016 - protein, 9 aa, Severe acute respiratory syndrome coronavirus 2
RLSFKELLV

SEQ ID NO: 7017 - protein, 10 aa, Severe acute respiratory syndrome coronavirus 2
RLSFKELLVY

SEQ ID NO: 7018 - protein, 9 aa, Severe acute respiratory syndrome coronavirus 2
LSFKELLVY

SEQ ID NO: 7019 - protein, 10 aa, Severe acute respiratory syndrome coronavirus 2
KELLVYAADP

SEQ ID NO: 7020 - protein, 10 aa, Severe acute respiratory syndrome coronavirus 2
LLVYAADPAM

SEQ ID NO: 7021 - protein, 9 aa, Severe acute respiratory syndrome coronavirus 2
LVYAADPAM

SEQ ID NO: 7022 - protein, 9 aa, Severe acute respiratory syndrome coronavirus 2
VYAADPAMH

SEQ ID NO: 7023 - protein, 10 aa, Severe acute respiratory syndrome coronavirus 2
VYAADPAMHA

SEQ ID NO: 7024 - protein, 9 aa, Severe acute respiratory syndrome coronavirus 2
DPAMHAASG

SEQ ID NO: 7025 - protein, 10 aa, Severe acute respiratory syndrome coronavirus 2
AMHAASGNLL

SEQ ID NO: 7026 - protein, 10 aa, Severe acute respiratory syndrome coronavirus 2
MHAASGNLLL

SEQ ID NO: 7027 - protein, 9 aa, Severe acute respiratory syndrome coronavirus 2
HAASGNLLL

SEQ ID NO: 7028 - protein, 10 aa, Severe acute respiratory syndrome coronavirus 2
AASGNLLLDK

SEQ ID NO: 7029 - protein, 10 aa, Severe acute respiratory syndrome coronavirus 2
LLLDKRTTCF

SEQ ID NO: 7030 - protein, 9 aa, Severe acute respiratory syndrome coronavirus 2
LLDKRTTCF

SEQ ID NO: 7031 - protein, 10 aa, Severe acute respiratory syndrome coronavirus 2
LLDKRTTCFS

SEQ ID NO: 7032 - protein, 10 aa, Severe acute respiratory syndrome coronavirus 2
LDKRTTCFSV

SEQ ID NO: 7033 - protein, 9 aa, Severe acute respiratory syndrome coronavirus 2
SVAALTNNV

SEQ ID NO: 7034 - protein, 10 aa, Severe acute respiratory syndrome coronavirus 2
VAALTNNVAF

SEQ ID NO: 7035 - protein, 9 aa, Severe acute respiratory syndrome coronavirus 2
AALTNNVAF

SEQ ID NO: 7036 - protein, 10 aa, Severe acute respiratory syndrome coronavirus 2
LTNNVAFQTV

SEQ ID NO: 7037 - protein, 10 aa, Severe acute respiratory syndrome coronavirus 2
AFQTVKPGNF

SEQ ID NO: 7038 - protein, 10 aa, Severe acute respiratory syndrome coronavirus 2
QTVKPGNFNK

SEQ ID NO: 7039 - protein, 9 aa, Severe acute respiratory syndrome coronavirus 2
TVKPGNFNK

SEQ ID NO: 7040 - protein, 9 aa, Severe acute respiratory syndrome coronavirus 2
KPGNFNKDF

SEQ ID NO: 7041 - protein, 10 aa, Severe acute respiratory syndrome coronavirus 2
GNFNKDFYDF

SEQ ID NO: 7042 - protein, 9 aa, Severe acute respiratory syndrome coronavirus 2
NFNKDFYDF

SEQ ID NO: 7043 - protein, 10 aa, Severe acute respiratory syndrome coronavirus 2
FNKDFYDFAV

SEQ ID NO: 7044 - protein, 9 aa, Severe acute respiratory syndrome coronavirus 2
NKDFYDFAV

SEQ ID NO: 7045 - protein, 10 aa, Severe acute respiratory syndrome coronavirus 2
KDFYDFAVSK

SEQ ID NO: 7046 - protein, 10 aa, Severe acute respiratory syndrome coronavirus 2
FYDFAVSKGF

SEQ ID NO: 7047 - protein, 10 aa, Severe acute respiratory syndrome coronavirus 2
YDFAVSKGFF

SEQ ID NO: 7048 - protein, 9 aa, Severe acute respiratory syndrome coronavirus 2
DFAVSKGFF

SEQ ID NO: 7049 - protein, 9 aa, Severe acute respiratory syndrome coronavirus 2
FAVSKGFFK

SEQ ID NO: 7050 - protein, 10 aa, Severe acute respiratory syndrome coronavirus 2
FFKEGSSVEL

SEQ ID NO: 7051 - protein, 9 aa, Severe acute respiratory syndrome coronavirus 2
KEGSSVELK

SEQ ID NO: 7052 - protein, 9 aa, Severe acute respiratory syndrome coronavirus 2
GSSVELKHF

SEQ ID NO: 7053 - protein, 10 aa, Severe acute respiratory syndrome coronavirus 2
GSSVELKHFF

SEQ ID NO: 7054 - protein, 10 aa, Severe acute respiratory syndrome coronavirus 2
SSVELKHFFF

SEQ ID NO: 7055 - protein, 9 aa, Severe acute respiratory syndrome coronavirus 2
SVELKHFFF

SEQ ID NO: 7056 - protein, 10 aa, Severe acute respiratory syndrome coronavirus 2
SVELKHFFFA

SEQ ID NO: 7057 - protein, 9 aa, Severe acute respiratory syndrome coronavirus 2
FFAQDGNAA

SEQ ID NO: 7058 - protein, 10 aa, Severe acute respiratory syndrome coronavirus 2
FFAQDGNAAI

SEQ ID NO: 7059 - protein, 9 aa, Severe acute respiratory syndrome coronavirus 2
FAQDGNAAI

SEQ ID NO: 7060 - protein, 9 aa, Severe acute respiratory syndrome coronavirus 2
NAAISDYDY

SEQ ID NO: 7061 - protein, 10 aa, Severe acute respiratory syndrome coronavirus 2
NAAISDYDYY

SEQ ID NO: 7062 - protein, 9 aa, Severe acute respiratory syndrome coronavirus 2
AAISDYDYY

SEQ ID NO: 7063 - protein, 10 aa, Severe acute respiratory syndrome coronavirus 2
AISDYDYYRY

SEQ ID NO: 7064 - protein, 9 aa, Severe acute respiratory syndrome coronavirus 2
ISDYDYYRY

SEQ ID NO: 7065 - protein, 10 aa, Severe acute respiratory syndrome coronavirus 2
ISDYDYYRYN

SEQ ID NO: 7066 - protein, 10 aa, Severe acute respiratory syndrome coronavirus 2
SDYDYYRYNL

SEQ ID NO: 7067 - protein, 9 aa, Severe acute respiratory syndrome coronavirus 2
DYDYYRYNL

SEQ ID NO: 7068 - protein, 10 aa, Severe acute respiratory syndrome coronavirus 2
DYYRYNLPTM

SEQ ID NO: 7069 - protein, 9 aa, Severe acute respiratory syndrome coronavirus 2
YYRYNLPTM

SEQ ID NO: 7070 - protein, 10 aa, Severe acute respiratory syndrome coronavirus 2
YYRYNLPTMC

SEQ ID NO: 7071 - protein, 9 aa, Severe acute respiratory syndrome coronavirus 2
RYNLPTMCD

SEQ ID NO: 7072 - protein, 10 aa, Severe acute respiratory syndrome coronavirus 2
RYNLPTMCDI

SEQ ID NO: 7073 - protein, 9 aa, Severe acute respiratory syndrome coronavirus 2
YNLPTMCDI

SEQ ID NO: 7074 - protein, 10 aa, Severe acute respiratory syndrome coronavirus 2
LPTMCDIRQL

SEQ ID NO: 7075 - protein, 9 aa, Severe acute respiratory syndrome coronavirus 2
TMCDIRQLL

SEQ ID NO: 7076 - protein, 10 aa, Severe acute respiratory syndrome coronavirus 2
TMCDIRQLLF

SEQ ID NO: 7077 - protein, 9 aa, Severe acute respiratory syndrome coronavirus 2
MCDIRQLLF

SEQ ID NO: 7078 - protein, 10 aa, Severe acute respiratory syndrome coronavirus 2
MCDIRQLLFV

SEQ ID NO: 7079 - protein, 9 aa, Severe acute respiratory syndrome coronavirus 2
RQLLFVVEV

SEQ ID NO: 7080 - protein, 10 aa, Severe acute respiratory syndrome coronavirus 2
RQLLFVVEVV

SEQ ID NO: 7081 - protein, 9 aa, Severe acute respiratory syndrome coronavirus 2
QLLFVVEVV

SEQ ID NO: 7082 - protein, 10 aa, Severe acute respiratory syndrome coronavirus 2
LLFVVEVVDK

SEQ ID NO: 7083 - protein, 9 aa, Severe acute respiratory syndrome coronavirus 2
FVVEVVDKY

SEQ ID NO: 7084 - protein, 10 aa, Severe acute respiratory syndrome coronavirus 2
VVEVVDKYFD

SEQ ID NO: 7085 - protein, 10 aa, Severe acute respiratory syndrome coronavirus 2
VEVVDKYFDC

SEQ ID NO: 7086 - protein, 10 aa, Severe acute respiratory syndrome coronavirus 2
EVVDKYFDCY

SEQ ID NO: 7087 - protein, 9 aa, Severe acute respiratory syndrome coronavirus 2
VVDKYFDCY

SEQ ID NO: 7088 - protein, 10 aa, Severe acute respiratory syndrome coronavirus 2
VVDKYFDCYD

SEQ ID NO: 7089 - protein, 9 aa, Severe acute respiratory syndrome coronavirus 2
KYFDCYDGG

SEQ ID NO: 7090 - protein, 10 aa, Severe acute respiratory syndrome coronavirus 2
KYFDCYDGGC

SEQ ID NO: 7091 - protein, 10 aa, Severe acute respiratory syndrome coronavirus 2
YFDCYDGGCI

SEQ ID NO: 7092 - protein, 10 aa, Severe acute respiratory syndrome coronavirus 2
NQVIVNNLDK

SEQ ID NO: 7093 - protein, 9 aa, Severe acute respiratory syndrome coronavirus 2
QVIVNNLDK

SEQ ID NO: 7094 - protein, 10 aa, Severe acute respiratory syndrome coronavirus 2
NLDKSAGFPF

SEQ ID NO: 7095 - protein, 9 aa, Severe acute respiratory syndrome coronavirus 2
LDKSAGFPF

SEQ ID NO: 7096 - protein, 9 aa, Severe acute respiratory syndrome coronavirus 2
KSAGFPFNK

SEQ ID NO: 7097 - protein, 10 aa, Severe acute respiratory syndrome coronavirus 2
AGFPFNKWGK

SEQ ID NO: 7098 - protein, 9 aa, Severe acute respiratory syndrome coronavirus 2
FPFNKWGKA

SEQ ID NO: 7099 - protein, 10 aa, Severe acute respiratory syndrome coronavirus 2
FPFNKWGKAR

SEQ ID NO: 7100 - protein, 10 aa, Severe acute respiratory syndrome coronavirus 2
PFNKWGKARL

SEQ ID NO: 7101 - protein, 9 aa, Severe acute respiratory syndrome coronavirus 2
NKWGKARLY

SEQ ID NO: 7102 - protein, 10 aa, Severe acute respiratory syndrome coronavirus 2
NKWGKARLYY

SEQ ID NO: 7103 - protein, 9 aa, Severe acute respiratory syndrome coronavirus 2
KWGKARLYY

SEQ ID NO: 7104 - protein, 10 aa, Severe acute respiratory syndrome coronavirus 2
KWGKARLYYD

SEQ ID NO: 7105 - protein, 9 aa, Severe acute respiratory syndrome coronavirus 2
KARLYYDSM

SEQ ID NO: 7106 - protein, 10 aa, Severe acute respiratory syndrome coronavirus 2
ARLYYDSMSY

SEQ ID NO: 7107 - protein, 9 aa, Severe acute respiratory syndrome coronavirus 2
RLYYDSMSY

SEQ ID NO: 7108 - protein, 10 aa, Severe acute respiratory syndrome coronavirus 2
RLYYDSMSYE

SEQ ID NO: 7109 - protein, 9 aa, Severe acute respiratory syndrome coronavirus 2
LYYDSMSYE

SEQ ID NO: 7110 - protein, 10 aa, Severe acute respiratory syndrome coronavirus 2
LYYDSMSYED

SEQ ID NO: 7111 - protein, 9 aa, Severe acute respiratory syndrome coronavirus 2
YYDSMSYED

SEQ ID NO: 7112 - protein, 10 aa, Severe acute respiratory syndrome coronavirus 2
MSYEDQDALF

SEQ ID NO: 7113 - protein, 9 aa, Severe acute respiratory syndrome coronavirus 2
SYEDQDALF

SEQ ID NO: 7114 - protein, 9 aa, Severe acute respiratory syndrome coronavirus 2
YEDQDALFA

SEQ ID NO: 7115 - protein, 10 aa, Severe acute respiratory syndrome coronavirus 2
YEDQDALFAY

SEQ ID NO: 7116 - protein, 9 aa, Severe acute respiratory syndrome coronavirus 2
EDQDALFAY

SEQ ID NO: 7117 - protein, 10 aa, Severe acute respiratory syndrome coronavirus 2
EDQDALFAYT

SEQ ID NO: 7118 - protein, 9 aa, Severe acute respiratory syndrome coronavirus 2
ALFAYTKRN

SEQ ID NO: 7119 - protein, 10 aa, Severe acute respiratory syndrome coronavirus 2
ALFAYTKRNV

SEQ ID NO: 7120 - protein, 10 aa, Severe acute respiratory syndrome coronavirus 2
LFAYTKRNVI

SEQ ID NO: 7121 - protein, 9 aa, Severe acute respiratory syndrome coronavirus 2
FAYTKRNVI

SEQ ID NO: 7122 - protein, 9 aa, Severe acute respiratory syndrome coronavirus 2
IPTITQMNL

SEQ ID NO: 7123 - protein, 9 aa, Severe acute respiratory syndrome coronavirus 2
PTITQMNLK

SEQ ID NO: 7124 - protein, 10 aa, Severe acute respiratory syndrome coronavirus 2
PTITQMNLKY

SEQ ID NO: 7125 - protein, 9 aa, Severe acute respiratory syndrome coronavirus 2
TITQMNLKY

SEQ ID NO: 7126 - protein, 9 aa, Severe acute respiratory syndrome coronavirus 2
TQMNLKYAI

SEQ ID NO: 7127 - protein, 10 aa, Severe acute respiratory syndrome coronavirus 2
MNLKYAISAK

SEQ ID NO: 7128 - protein, 9 aa, Severe acute respiratory syndrome coronavirus 2
SAKNRARTV

SEQ ID NO: 7129 - protein, 10 aa, Severe acute respiratory syndrome coronavirus 2
SAKNRARTVA

SEQ ID NO: 7130 - protein, 10 aa, Severe acute respiratory syndrome coronavirus 2
KNRARTVAGV

SEQ ID NO: 7131 - protein, 10 aa, Severe acute respiratory syndrome coronavirus 2
RARTVAGVSI

SEQ ID NO: 7132 - protein, 9 aa, Severe acute respiratory syndrome coronavirus 2
ARTVAGVSI

SEQ ID NO: 7133 - protein, 10 aa, Severe acute respiratory syndrome coronavirus 2
TVAGVSICST

SEQ ID NO: 7134 - protein, 10 aa, Severe acute respiratory syndrome coronavirus 2
GVSICSTMTN

SEQ ID NO: 7135 - protein, 10 aa, Severe acute respiratory syndrome coronavirus 2
VSICSTMTNR

SEQ ID NO: 7136 - protein, 9 aa, Severe acute respiratory syndrome coronavirus 2
SICSTMTNR

SEQ ID NO: 7137 - protein, 10 aa, Severe acute respiratory syndrome coronavirus 2
ICSTMTNRQF

SEQ ID NO: 7138 - protein, 9 aa, Severe acute respiratory syndrome coronavirus 2
CSTMTNRQF

SEQ ID NO: 7139 - protein, 9 aa, Severe acute respiratory syndrome coronavirus 2
STMTNRQFH

SEQ ID NO: 7140 - protein, 10 aa, Severe acute respiratory syndrome coronavirus 2
STMTNRQFHQ

SEQ ID NO: 7141 - protein, 10 aa, Severe acute respiratory syndrome coronavirus 2
TMTNRQFHQK

SEQ ID NO: 7142 - protein, 9 aa, Severe acute respiratory syndrome coronavirus 2
MTNRQFHQK

SEQ ID NO: 7143 - protein, 9 aa, Severe acute respiratory syndrome coronavirus 2
RQFHQKLLK

SEQ ID NO: 7144 - protein, 9 aa, Severe acute respiratory syndrome coronavirus 2
KLLKSIAAT

SEQ ID NO: 7145 - protein, 10 aa, Severe acute respiratory syndrome coronavirus 2
KLLKSIAATR

SEQ ID NO: 7146 - protein, 10 aa, Severe acute respiratory syndrome coronavirus 2
SIAATRGATV

SEQ ID NO: 7147 - protein, 9 aa, Severe acute respiratory syndrome coronavirus 2
IAATRGATV

SEQ ID NO: 7148 - protein, 10 aa, Severe acute respiratory syndrome coronavirus 2
GATVVIGTSK

SEQ ID NO: 7149 - protein, 9 aa, Severe acute respiratory syndrome coronavirus 2
ATVVIGTSK

SEQ ID NO: 7150 - protein, 10 aa, Severe acute respiratory syndrome coronavirus 2
TVVIGTSKFY

SEQ ID NO: 7151 - protein, 9 aa, Severe acute respiratory syndrome coronavirus 2
VVIGTSKFY

SEQ ID NO: 7152 - protein, 9 aa, Severe acute respiratory syndrome coronavirus 2
GTSKFYGGW

SEQ ID NO: 7153 - protein, 10 aa, Severe acute respiratory syndrome coronavirus 2
TSKFYGGWHN

SEQ ID NO: 7154 - protein, 9 aa, Severe acute respiratory syndrome coronavirus 2
KFYGGWHNM

SEQ ID NO: 7155 - protein, 10 aa, Severe acute respiratory syndrome coronavirus 2
KFYGGWHNML

SEQ ID NO: 7156 - protein, 9 aa, Severe acute respiratory syndrome coronavirus 2
FYGGWHNML

SEQ ID NO: 7157 - protein, 10 aa, Severe acute respiratory syndrome coronavirus 2
FYGGWHNMLK

SEQ ID NO: 7158 - protein, 9 aa, Severe acute respiratory syndrome coronavirus 2
YGGWHNMLK

SEQ ID NO: 7159 - protein, 10 aa, Severe acute respiratory syndrome coronavirus 2
GWHNMLKTVY

SEQ ID NO: 7160 - protein, 9 aa, Severe acute respiratory syndrome coronavirus 2
WHNMLKTVY

SEQ ID NO: 7161 - protein, 10 aa, Severe acute respiratory syndrome coronavirus 2
NMLKTVYSDV

SEQ ID NO: 7162 - protein, 9 aa, Severe acute respiratory syndrome coronavirus 2
MLKTVYSDV

SEQ ID NO: 7163 - protein, 10 aa, Severe acute respiratory syndrome coronavirus 2
VYSDVENPHL

SEQ ID NO: 7164 - protein, 9 aa, Severe acute respiratory syndrome coronavirus 2
YSDVENPHL

SEQ ID NO: 7165 - protein, 10 aa, Severe acute respiratory syndrome coronavirus 2
YSDVENPHLM

SEQ ID NO: 7166 - protein, 10 aa, Severe acute respiratory syndrome coronavirus 2
DVENPHLMGW

SEQ ID NO: 7167 - protein, 9 aa, Severe acute respiratory syndrome coronavirus 2
VENPHLMGW

SEQ ID NO: 7168 - protein, 10 aa, Severe acute respiratory syndrome coronavirus 2
VENPHLMGWD

SEQ ID NO: 7169 - protein, 10 aa, Severe acute respiratory syndrome coronavirus 2
ENPHLMGWDY

SEQ ID NO: 7170 - protein, 9 aa, Severe acute respiratory syndrome coronavirus 2
NPHLMGWDY

SEQ ID NO: 7171 - protein, 9 aa, Severe acute respiratory syndrome coronavirus 2
HLMGWDYPK

SEQ ID NO: 7172 - protein, 10 aa, Severe acute respiratory syndrome coronavirus 2
WDYPKCDRAM

SEQ ID NO: 7173 - protein, 9 aa, Severe acute respiratory syndrome coronavirus 2
DYPKCDRAM

SEQ ID NO: 7174 - protein, 9 aa, Severe acute respiratory syndrome coronavirus 2
YPKCDRAMP

SEQ ID NO: 7175 - protein, 10 aa, Severe acute respiratory syndrome coronavirus 2
YPKCDRAMPN

SEQ ID NO: 7176 - protein, 9 aa, Severe acute respiratory syndrome coronavirus 2
RAMPNMLRI

SEQ ID NO: 7177 - protein, 10 aa, Severe acute respiratory syndrome coronavirus 2
RAMPNMLRIM

SEQ ID NO: 7178 - protein, 10 aa, Severe acute respiratory syndrome coronavirus 2
AMPNMLRIMA

SEQ ID NO: 7179 - protein, 9 aa, Severe acute respiratory syndrome coronavirus 2
MPNMLRIMA

SEQ ID NO: 7180 - protein, 10 aa, Severe acute respiratory syndrome coronavirus 2
MPNMLRIMAS

SEQ ID NO: 7181 - protein, 9 aa, Severe acute respiratory syndrome coronavirus 2
NMLRIMASL

SEQ ID NO: 7182 - protein, 10 aa, Severe acute respiratory syndrome coronavirus 2
NMLRIMASLV

SEQ ID NO: 7183 - protein, 9 aa, Severe acute respiratory syndrome coronavirus 2
MLRIMASLV

SEQ ID NO: 7184 - protein, 10 aa, Severe acute respiratory syndrome coronavirus 2
MLRIMASLVL

SEQ ID NO: 7185 - protein, 9 aa, Severe acute respiratory syndrome coronavirus 2
LRIMASLVL

SEQ ID NO: 7186 - protein, 10 aa, Severe acute respiratory syndrome coronavirus 2
RIMASLVLAR

SEQ ID NO: 7187 - protein, 9 aa, Severe acute respiratory syndrome coronavirus 2
IMASLVLAR

SEQ ID NO: 7188 - protein, 10 aa, Severe acute respiratory syndrome coronavirus 2
IMASLVLARK

SEQ ID NO: 7189 - protein, 9 aa, Severe acute respiratory syndrome coronavirus 2
MASLVLARK

SEQ ID NO: 7190 - protein, 9 aa, Severe acute respiratory syndrome coronavirus 2
LARKHTTCC

SEQ ID NO: 7191 - protein, 10 aa, Severe acute respiratory syndrome coronavirus 2
ARKHTTCCSL

SEQ ID NO: 7192 - protein, 9 aa, Severe acute respiratory syndrome coronavirus 2
HTTCCSLSH

SEQ ID NO: 7193 - protein, 10 aa, Severe acute respiratory syndrome coronavirus 2
HTTCCSLSHR

SEQ ID NO: 7194 - protein, 9 aa, Severe acute respiratory syndrome coronavirus 2
TTCCSLSHR

SEQ ID NO: 7195 - protein, 10 aa, Severe acute respiratory syndrome coronavirus 2
TTCCSLSHRF

SEQ ID NO: 7196 - protein, 10 aa, Severe acute respiratory syndrome coronavirus 2
TCCSLSHRFY

SEQ ID NO: 7197 - protein, 9 aa, Severe acute respiratory syndrome coronavirus 2
CCSLSHRFY

SEQ ID NO: 7198 - protein, 9 aa, Severe acute respiratory syndrome coronavirus 2
CSLSHRFYR

SEQ ID NO: 7199 - protein, 10 aa, Severe acute respiratory syndrome coronavirus 2
CSLSHRFYRL

SEQ ID NO: 7200 - protein, 9 aa, Severe acute respiratory syndrome coronavirus 2
SLSHRFYRL

SEQ ID NO: 7201 - protein, 9 aa, Severe acute respiratory syndrome coronavirus 2
RLANECAQV

SEQ ID NO: 7202 - protein, 10 aa, Severe acute respiratory syndrome coronavirus 2
RLANECAQVL

SEQ ID NO: 7203 - protein, 9 aa, Severe acute respiratory syndrome coronavirus 2
LANECAQVL

SEQ ID NO: 7204 - protein, 10 aa, Severe acute respiratory syndrome coronavirus 2
NECAQVLSEM

SEQ ID NO: 7205 - protein, 10 aa, Severe acute respiratory syndrome coronavirus 2
VLSEMVMCGG

SEQ ID NO: 7206 - protein, 9 aa, Severe acute respiratory syndrome coronavirus 2
LSEMVMCGG

SEQ ID NO: 7207 - protein, 10 aa, Severe acute respiratory syndrome coronavirus 2
LSEMVMCGGS

SEQ ID NO: 7208 - protein, 9 aa, Severe acute respiratory syndrome coronavirus 2
SEMVMCGGS

SEQ ID NO: 7209 - protein, 10 aa, Severe acute respiratory syndrome coronavirus 2
SEMVMCGGSL

SEQ ID NO: 7210 - protein, 10 aa, Severe acute respiratory syndrome coronavirus 2
EMVMCGGSLY

SEQ ID NO: 7211 - protein, 9 aa, Severe acute respiratory syndrome coronavirus 2
MVMCGGSLY

SEQ ID NO: 7212 - protein, 10 aa, Severe acute respiratory syndrome coronavirus 2
MVMCGGSLYV

SEQ ID NO: 7213 - protein, 10 aa, Severe acute respiratory syndrome coronavirus 2
VMCGGSLYVK

SEQ ID NO: 7214 - protein, 10 aa, Severe acute respiratory syndrome coronavirus 2
KPGGTSSGDA

SEQ ID NO: 7215 - protein, 10 aa, Severe acute respiratory syndrome coronavirus 2
TSSGDATTAY

SEQ ID NO: 7216 - protein, 9 aa, Severe acute respiratory syndrome coronavirus 2
SSGDATTAY

SEQ ID NO: 7217 - protein, 9 aa, Severe acute respiratory syndrome coronavirus 2
ATTAYANSV

SEQ ID NO: 7218 - protein, 9 aa, Severe acute respiratory syndrome coronavirus 2
TTAYANSVF

SEQ ID NO: 7219 - protein, 10 aa, Severe acute respiratory syndrome coronavirus 2
TTAYANSVFN

SEQ ID NO: 7220 - protein, 9 aa, Severe acute respiratory syndrome coronavirus 2
AYANSVFNI

SEQ ID NO: 7221 - protein, 10 aa, Severe acute respiratory syndrome coronavirus 2
AYANSVFNIC

SEQ ID NO: 7222 - protein, 9 aa, Severe acute respiratory syndrome coronavirus 2
SVFNICQAV

SEQ ID NO: 7223 - protein, 10 aa, Severe acute respiratory syndrome coronavirus 2
VFNICQAVTA

SEQ ID NO: 7224 - protein, 9 aa, Severe acute respiratory syndrome coronavirus 2
AVTANVNAL

SEQ ID NO: 7225 - protein, 10 aa, Severe acute respiratory syndrome coronavirus 2
AVTANVNALL

SEQ ID NO: 7226 - protein, 9 aa, Severe acute respiratory syndrome coronavirus 2
VTANVNALL

SEQ ID NO: 7227 - protein, 10 aa, Severe acute respiratory syndrome coronavirus 2
NVNALLSTDG

SEQ ID NO: 7228 - protein, 10 aa, Severe acute respiratory syndrome coronavirus 2
NALLSTDGNK

SEQ ID NO: 7229 - protein, 9 aa, Severe acute respiratory syndrome coronavirus 2
ALLSTDGNK

SEQ ID NO: 7230 - protein, 10 aa, Severe acute respiratory syndrome coronavirus 2
ALLSTDGNKI

SEQ ID NO: 7231 - protein, 9 aa, Severe acute respiratory syndrome coronavirus 2
LLSTDGNKI

SEQ ID NO: 7232 - protein, 9 aa, Severe acute respiratory syndrome coronavirus 2
STDGNKIAD

SEQ ID NO: 7233 - protein, 10 aa, Severe acute respiratory syndrome coronavirus 2
STDGNKIADK

SEQ ID NO: 7234 - protein, 10 aa, Severe acute respiratory syndrome coronavirus 2
IADKYVRNLQ

SEQ ID NO: 7235 - protein, 10 aa, Severe acute respiratory syndrome coronavirus 2
KYVRNLQHRL

SEQ ID NO: 7236 - protein, 9 aa, Severe acute respiratory syndrome coronavirus 2
YVRNLQHRL

SEQ ID NO: 7237 - protein, 10 aa, Severe acute respiratory syndrome coronavirus 2
YVRNLQHRLY

SEQ ID NO: 7238 - protein, 9 aa, Severe acute respiratory syndrome coronavirus 2
LQHRLYECL

SEQ ID NO: 7239 - protein, 10 aa, Severe acute respiratory syndrome coronavirus 2
LQHRLYECLY

SEQ ID NO: 7240 - protein, 9 aa, Severe acute respiratory syndrome coronavirus 2
RLYECLYRN

SEQ ID NO: 7241 - protein, 10 aa, Severe acute respiratory syndrome coronavirus 2
RLYECLYRNR

SEQ ID NO: 7242 - protein, 10 aa, Severe acute respiratory syndrome coronavirus 2
YECLYRNRDV

SEQ ID NO: 7243 - protein, 9 aa, Severe acute respiratory syndrome coronavirus 2
RNRDVDTDF

SEQ ID NO: 7244 - protein, 9 aa, Severe acute respiratory syndrome coronavirus 2
NRDVDTDFV

SEQ ID NO: 7245 - protein, 10 aa, Severe acute respiratory syndrome coronavirus 2
DVDTDFVNEF

SEQ ID NO: 7246 - protein, 9 aa, Severe acute respiratory syndrome coronavirus 2
VDTDFVNEF

SEQ ID NO: 7247 - protein, 10 aa, Severe acute respiratory syndrome coronavirus 2
VDTDFVNEFY

SEQ ID NO: 7248 - protein, 9 aa, Severe acute respiratory syndrome coronavirus 2
DTDFVNEFY

SEQ ID NO: 7249 - protein, 10 aa, Severe acute respiratory syndrome coronavirus 2
DTDFVNEFYA

SEQ ID NO: 7250 - protein, 10 aa, Severe acute respiratory syndrome coronavirus 2
TDFVNEFYAY

SEQ ID NO: 7251 - protein, 9 aa, Severe acute respiratory syndrome coronavirus 2
FVNEFYAYL

SEQ ID NO: 7252 - protein, 10 aa, Severe acute respiratory syndrome coronavirus 2
FVNEFYAYLR

SEQ ID NO: 7253 - protein, 9 aa, Severe acute respiratory syndrome coronavirus 2
NEFYAYLRK

SEQ ID NO: 7254 - protein, 10 aa, Severe acute respiratory syndrome coronavirus 2
NEFYAYLRKH

SEQ ID NO: 7255 - protein, 10 aa, Severe acute respiratory syndrome coronavirus 2
EFYAYLRKHF

SEQ ID NO: 7256 - protein, 10 aa, Severe acute respiratory syndrome coronavirus 2
FYAYLRKHFS

SEQ ID NO: 7257 - protein, 9 aa, Severe acute respiratory syndrome coronavirus 2
AYLRKHFSM

SEQ ID NO: 7258 - protein, 9 aa, Severe acute respiratory syndrome coronavirus 2
YLRKHFSMM

SEQ ID NO: 7259 - protein, 10 aa, Severe acute respiratory syndrome coronavirus 2
YLRKHFSMMI

SEQ ID NO: 7260 - protein, 9 aa, Severe acute respiratory syndrome coronavirus 2
SMMILSDDA

SEQ ID NO: 7261 - protein, 10 aa, Severe acute respiratory syndrome coronavirus 2
SMMILSDDAV

SEQ ID NO: 7262 - protein, 9 aa, Severe acute respiratory syndrome coronavirus 2
MMILSDDAV

SEQ ID NO: 7263 - protein, 10 aa, Severe acute respiratory syndrome coronavirus 2
MMILSDDAVV

SEQ ID NO: 7264 - protein, 9 aa, Severe acute respiratory syndrome coronavirus 2
MILSDDAVV

SEQ ID NO: 7265 - protein, 10 aa, Severe acute respiratory syndrome coronavirus 2
ILSDDAVVCF

SEQ ID NO: 7266 - protein, 9 aa, Severe acute respiratory syndrome coronavirus 2
LSDDAVVCF

SEQ ID NO: 7267 - protein, 10 aa, Severe acute respiratory syndrome coronavirus 2
LSDDAVVCFN

SEQ ID NO: 7268 - protein, 10 aa, Severe acute respiratory syndrome coronavirus 2
DAVVCFNSTY

SEQ ID NO: 7269 - protein, 9 aa, Severe acute respiratory syndrome coronavirus 2
AVVCFNSTY

SEQ ID NO: 7270 - protein, 10 aa, Severe acute respiratory syndrome coronavirus 2
AVVCFNSTYA

SEQ ID NO: 7271 - protein, 9 aa, Severe acute respiratory syndrome coronavirus 2
VVCFNSTYA

SEQ ID NO: 7272 - protein, 9 aa, Severe acute respiratory syndrome coronavirus 2
STYASQGLV

SEQ ID NO: 7273 - protein, 10 aa, Severe acute respiratory syndrome coronavirus 2
ASQGLVASIK

SEQ ID NO: 7274 - protein, 10 aa, Severe acute respiratory syndrome coronavirus 2
GLVASIKNFK

SEQ ID NO: 7275 - protein, 9 aa, Severe acute respiratory syndrome coronavirus 2
LVASIKNFK

SEQ ID NO: 7276 - protein, 10 aa, Severe acute respiratory syndrome coronavirus 2
SIKNFKSVLY

SEQ ID NO: 7277 - protein, 10 aa, Severe acute respiratory syndrome coronavirus 2
IKNFKSVLYY

SEQ ID NO: 7278 - protein, 9 aa, Severe acute respiratory syndrome coronavirus 2
KNFKSVLYY

SEQ ID NO: 7279 - protein, 9 aa, Severe acute respiratory syndrome coronavirus 2
SVLYYQNNV

SEQ ID NO: 7280 - protein, 10 aa, Severe acute respiratory syndrome coronavirus 2
SVLYYQNNVF

SEQ ID NO: 7281 - protein, 10 aa, Severe acute respiratory syndrome coronavirus 2
VLYYQNNVFM

SEQ ID NO: 7282 - protein, 9 aa, Severe acute respiratory syndrome coronavirus 2
LYYQNNVFM

SEQ ID NO: 7283 - protein, 10 aa, Severe acute respiratory syndrome coronavirus 2
LYYQNNVFMS

SEQ ID NO: 7284 - protein, 9 aa, Severe acute respiratory syndrome coronavirus 2
YYQNNVFMS

SEQ ID NO: 7285 - protein, 10 aa, Severe acute respiratory syndrome coronavirus 2
YYQNNVFMSE

SEQ ID NO: 7286 - protein, 10 aa, Severe acute respiratory syndrome coronavirus 2
YQNNVFMSEA

SEQ ID NO: 7287 - protein, 10 aa, Severe acute respiratory syndrome coronavirus 2
QNNVFMSEAK

SEQ ID NO: 7288 - protein, 9 aa, Severe acute respiratory syndrome coronavirus 2
VFMSEAKCW

SEQ ID NO: 7289 - protein, 9 aa, Severe acute respiratory syndrome coronavirus 2
FMSEAKCWT

SEQ ID NO: 7290 - protein, 10 aa, Severe acute respiratory syndrome coronavirus 2
FMSEAKCWTE

SEQ ID NO: 7291 - protein, 9 aa, Severe acute respiratory syndrome coronavirus 2
MSEAKCWTE

SEQ ID NO: 7292 - protein, 10 aa, Severe acute respiratory syndrome coronavirus 2
MSEAKCWTET

SEQ ID NO: 7293 - protein, 9 aa, Severe acute respiratory syndrome coronavirus 2
SEAKCWTET

SEQ ID NO: 7294 - protein, 10 aa, Severe acute respiratory syndrome coronavirus 2
SEAKCWTETD

SEQ ID NO: 7295 - protein, 10 aa, Severe acute respiratory syndrome coronavirus 2
KCWTETDLTK

SEQ ID NO: 7296 - protein, 9 aa, Severe acute respiratory syndrome coronavirus 2
WTETDLTKG

SEQ ID NO: 7297 - protein, 10 aa, Severe acute respiratory syndrome coronavirus 2
WTETDLTKGP

SEQ ID NO: 7298 - protein, 9 aa, Severe acute respiratory syndrome coronavirus 2
TETDLTKGP

SEQ ID NO: 7299 - protein, 9 aa, Severe acute respiratory syndrome coronavirus 2
ETDLTKGPH

SEQ ID NO: 7300 - protein, 10 aa, Severe acute respiratory syndrome coronavirus 2
ETDLTKGPHE

SEQ ID NO: 7301 - protein, 10 aa, Severe acute respiratory syndrome coronavirus 2
TDLTKGPHEF

SEQ ID NO: 7302 - protein, 9 aa, Severe acute respiratory syndrome coronavirus 2
DLTKGPHEF

SEQ ID NO: 7303 - protein, 9 aa, Severe acute respiratory syndrome coronavirus 2
HEFCSQHTM

SEQ ID NO: 7304 - protein, 10 aa, Severe acute respiratory syndrome coronavirus 2
HEFCSQHTML

SEQ ID NO: 7305 - protein, 9 aa, Severe acute respiratory syndrome coronavirus 2
FCSQHTMLV

SEQ ID NO: 7306 - protein, 10 aa, Severe acute respiratory syndrome coronavirus 2
FCSQHTMLVK

SEQ ID NO: 7307 - protein, 9 aa, Severe acute respiratory syndrome coronavirus 2
CSQHTMLVK

SEQ ID NO: 7308 - protein, 10 aa, Severe acute respiratory syndrome coronavirus 2
TMLVKQGDDY

SEQ ID NO: 7309 - protein, 9 aa, Severe acute respiratory syndrome coronavirus 2
MLVKQGDDY

SEQ ID NO: 7310 - protein, 10 aa, Severe acute respiratory syndrome coronavirus 2
MLVKQGDDYV

SEQ ID NO: 7311 - protein, 10 aa, Severe acute respiratory syndrome coronavirus 2
LVKQGDDYVY

SEQ ID NO: 7312 - protein, 9 aa, Severe acute respiratory syndrome coronavirus 2
KQGDDYVYL

SEQ ID NO: 7313 - protein, 10 aa, Severe acute respiratory syndrome coronavirus 2
QGDDYVYLPY

SEQ ID NO: 7314 - protein, 9 aa, Severe acute respiratory syndrome coronavirus 2
GDDYVYLPY

SEQ ID NO: 7315 - protein, 9 aa, Severe acute respiratory syndrome coronavirus 2
VYLPYPDPS

SEQ ID NO: 7316 - protein, 10 aa, Severe acute respiratory syndrome coronavirus 2
VYLPYPDPSR

SEQ ID NO: 7317 - protein, 10 aa, Severe acute respiratory syndrome coronavirus 2
YLPYPDPSRI

SEQ ID NO: 7318 - protein, 9 aa, Severe acute respiratory syndrome coronavirus 2
LPYPDPSRI

SEQ ID NO: 7319 - protein, 10 aa, Severe acute respiratory syndrome coronavirus 2
LPYPDPSRIL

SEQ ID NO: 7320 - protein, 9 aa, Severe acute respiratory syndrome coronavirus 2
PYPDPSRIL

SEQ ID NO: 7321 - protein, 10 aa, Severe acute respiratory syndrome coronavirus 2
YPDPSRILGA

SEQ ID NO: 7322 - protein, 10 aa, Severe acute respiratory syndrome coronavirus 2
PSRILGAGCF

SEQ ID NO: 7323 - protein, 10 aa, Severe acute respiratory syndrome coronavirus 2
SRILGAGCFV

SEQ ID NO: 7324 - protein, 9 aa, Severe acute respiratory syndrome coronavirus 2
FVDDIVKTD

SEQ ID NO: 7325 - protein, 10 aa, Severe acute respiratory syndrome coronavirus 2
FVDDIVKTDG

SEQ ID NO: 7326 - protein, 9 aa, Severe acute respiratory syndrome coronavirus 2
IVKTDGTLM

SEQ ID NO: 7327 - protein, 9 aa, Severe acute respiratory syndrome coronavirus 2
KTDGTLMIE

SEQ ID NO: 7328 - protein, 10 aa, Severe acute respiratory syndrome coronavirus 2
KTDGTLMIER

SEQ ID NO: 7329 - protein, 10 aa, Severe acute respiratory syndrome coronavirus 2
TLMIERFVSL

SEQ ID NO: 7330 - protein, 9 aa, Severe acute respiratory syndrome coronavirus 2
LMIERFVSL

SEQ ID NO: 7331 - protein, 10 aa, Severe acute respiratory syndrome coronavirus 2
LMIERFVSLA

SEQ ID NO: 7332 - protein, 10 aa, Severe acute respiratory syndrome coronavirus 2
MIERFVSLAI

SEQ ID NO: 7333 - protein, 9 aa, Severe acute respiratory syndrome coronavirus 2
IERFVSLAI

SEQ ID NO: 7334 - protein, 9 aa, Severe acute respiratory syndrome coronavirus 2
FVSLAIDAY

SEQ ID NO: 7335 - protein, 9 aa, Severe acute respiratory syndrome coronavirus 2
SLAIDAYPL

SEQ ID NO: 7336 - protein, 10 aa, Severe acute respiratory syndrome coronavirus 2
SLAIDAYPLT

SEQ ID NO: 7337 - protein, 10 aa, Severe acute respiratory syndrome coronavirus 2
LAIDAYPLTK

SEQ ID NO: 7338 - protein, 9 aa, Severe acute respiratory syndrome coronavirus 2
AIDAYPLTK

SEQ ID NO: 7339 - protein, 10 aa, Severe acute respiratory syndrome coronavirus 2
AIDAYPLTKH

SEQ ID NO: 7340 - protein, 10 aa, Severe acute respiratory syndrome coronavirus 2
PLTKHPNQEY

SEQ ID NO: 7341 - protein, 9 aa, Severe acute respiratory syndrome coronavirus 2
LTKHPNQEY

SEQ ID NO: 7342 - protein, 10 aa, Severe acute respiratory syndrome coronavirus 2
LTKHPNQEYA

SEQ ID NO: 7343 - protein, 9 aa, Severe acute respiratory syndrome coronavirus 2
HPNQEYADV

SEQ ID NO: 7344 - protein, 10 aa, Severe acute respiratory syndrome coronavirus 2
HPNQEYADVF

SEQ ID NO: 7345 - protein, 10 aa, Severe acute respiratory syndrome coronavirus 2
NQEYADVFHL

SEQ ID NO: 7346 - protein, 9 aa, Severe acute respiratory syndrome coronavirus 2
QEYADVFHL

SEQ ID NO: 7347 - protein, 10 aa, Severe acute respiratory syndrome coronavirus 2
QEYADVFHLY

SEQ ID NO: 7348 - protein, 9 aa, Severe acute respiratory syndrome coronavirus 2
EYADVFHLY

SEQ ID NO: 7349 - protein, 10 aa, Severe acute respiratory syndrome coronavirus 2
EYADVFHLYL

SEQ ID NO: 7350 - protein, 9 aa, Severe acute respiratory syndrome coronavirus 2
YADVFHLYL

SEQ ID NO: 7351 - protein, 10 aa, Severe acute respiratory syndrome coronavirus 2
YADVFHLYLQ

SEQ ID NO: 7352 - protein, 10 aa, Severe acute respiratory syndrome coronavirus 2
ADVFHLYLQY

SEQ ID NO: 7353 - protein, 9 aa, Severe acute respiratory syndrome coronavirus 2
DVFHLYLQY

SEQ ID NO: 7354 - protein, 9 aa, Severe acute respiratory syndrome coronavirus 2
VFHLYLQYI

SEQ ID NO: 7355 - protein, 10 aa, Severe acute respiratory syndrome coronavirus 2
VFHLYLQYIR

SEQ ID NO: 7356 - protein, 10 aa, Severe acute respiratory syndrome coronavirus 2
FHLYLQYIRK

SEQ ID NO: 7357 - protein, 9 aa, Severe acute respiratory syndrome coronavirus 2
HLYLQYIRK

SEQ ID NO: 7358 - protein, 10 aa, Severe acute respiratory syndrome coronavirus 2
HLYLQYIRKL

SEQ ID NO: 7359 - protein, 9 aa, Severe acute respiratory syndrome coronavirus 2
LYLQYIRKL

SEQ ID NO: 7360 - protein, 10 aa, Severe acute respiratory syndrome coronavirus 2
LYLQYIRKLH

SEQ ID NO: 7361 - protein, 10 aa, Severe acute respiratory syndrome coronavirus 2
YLQYIRKLHD

SEQ ID NO: 7362 - protein, 9 aa, Severe acute respiratory syndrome coronavirus 2
QYIRKLHDE

SEQ ID NO: 7363 - protein, 10 aa, Severe acute respiratory syndrome coronavirus 2
QYIRKLHDEL

SEQ ID NO: 7364 - protein, 9 aa, Severe acute respiratory syndrome coronavirus 2
YIRKLHDEL

SEQ ID NO: 7365 - protein, 9 aa, Severe acute respiratory syndrome coronavirus 2
KLHDELTGH

SEQ ID NO: 7366 - protein, 10 aa, Severe acute respiratory syndrome coronavirus 2
LHDELTGHML

SEQ ID NO: 7367 - protein, 10 aa, Severe acute respiratory syndrome coronavirus 2
DELTGHMLDM

SEQ ID NO: 7368 - protein, 10 aa, Severe acute respiratory syndrome coronavirus 2
ELTGHMLDMY

SEQ ID NO: 7369 - protein, 9 aa, Severe acute respiratory syndrome coronavirus 2
LTGHMLDMY

SEQ ID NO: 7370 - protein, 10 aa, Severe acute respiratory syndrome coronavirus 2
TGHMLDMYSV

SEQ ID NO: 7371 - protein, 9 aa, Severe acute respiratory syndrome coronavirus 2
GHMLDMYSV

SEQ ID NO: 7372 - protein, 9 aa, Severe acute respiratory syndrome coronavirus 2
HMLDMYSVM

SEQ ID NO: 7373 - protein, 10 aa, Severe acute respiratory syndrome coronavirus 2
HMLDMYSVML

SEQ ID NO: 7374 - protein, 9 aa, Severe acute respiratory syndrome coronavirus 2
MLDMYSVML

SEQ ID NO: 7375 - protein, 10 aa, Severe acute respiratory syndrome coronavirus 2
MLDMYSVMLT

SEQ ID NO: 7376 - protein, 9 aa, Severe acute respiratory syndrome coronavirus 2
MYSVMLTND

SEQ ID NO: 7377 - protein, 10 aa, Severe acute respiratory syndrome coronavirus 2
MYSVMLTNDN

SEQ ID NO: 7378 - protein, 10 aa, Severe acute respiratory syndrome coronavirus 2
VMLTNDNTSR

SEQ ID NO: 7379 - protein, 9 aa, Severe acute respiratory syndrome coronavirus 2
MLTNDNTSR

SEQ ID NO: 7380 - protein, 10 aa, Severe acute respiratory syndrome coronavirus 2
MLTNDNTSRY

SEQ ID NO: 7381 - protein, 9 aa, Severe acute respiratory syndrome coronavirus 2
LTNDNTSRY

SEQ ID NO: 7382 - protein, 10 aa, Severe acute respiratory syndrome coronavirus 2
LTNDNTSRYW

SEQ ID NO: 7383 - protein, 9 aa, Severe acute respiratory syndrome coronavirus 2
NDNTSRYWE

SEQ ID NO: 7384 - protein, 9 aa, Severe acute respiratory syndrome coronavirus 2
TSRYWEPEF

SEQ ID NO: 7385 - protein, 10 aa, Severe acute respiratory syndrome coronavirus 2
TSRYWEPEFY

SEQ ID NO: 7386 - protein, 10 aa, Severe acute respiratory syndrome coronavirus 2
RYWEPEFYEA

SEQ ID NO: 7387 - protein, 9 aa, Severe acute respiratory syndrome coronavirus 2
WEPEFYEAM

SEQ ID NO: 7388 - protein, 10 aa, Severe acute respiratory syndrome coronavirus 2
WEPEFYEAMY

SEQ ID NO: 7389 - protein, 9 aa, Severe acute respiratory syndrome coronavirus 2
EPEFYEAMY

SEQ ID NO: 7390 - protein, 10 aa, Severe acute respiratory syndrome coronavirus 2
FYEAMYTPHT

SEQ ID NO: 7391 - protein, 9 aa, Severe acute respiratory syndrome coronavirus 2
YEAMYTPHT

SEQ ID NO: 7392 - protein, 10 aa, Severe acute respiratory syndrome coronavirus 2
YEAMYTPHTV

SEQ ID NO: 7393 - protein, 10 aa, Severe acute respiratory syndrome coronavirus 2
EAMYTPHTVL

SEQ ID NO: 7394 - protein, 9 aa, Severe acute respiratory syndrome coronavirus 2
AMYTPHTVL

SEQ ID NO: 7395 - protein, 10 aa, Severe acute respiratory syndrome coronavirus 2
AMYTPHTVLQ

SEQ ID NO: 7396 - protein, 9 aa, Severe acute respiratory syndrome coronavirus 2
MYTPHTVLQ

SEQ ID NO: 7397 - protein, 9 aa, Severe acute respiratory syndrome coronavirus 2
MDLFMRIFT

SEQ ID NO: 7398 - protein, 10 aa, Severe acute respiratory syndrome coronavirus 2
MDLFMRIFTI

SEQ ID NO: 7399 - protein, 9 aa, Severe acute respiratory syndrome coronavirus 2
DLFMRIFTI

SEQ ID NO: 7400 - protein, 9 aa, Severe acute respiratory syndrome coronavirus 2
LFMRIFTIG

SEQ ID NO: 7401 - protein, 9 aa, Severe acute respiratory syndrome coronavirus 2
FMRIFTIGT

SEQ ID NO: 7402 - protein, 10 aa, Severe acute respiratory syndrome coronavirus 2
FMRIFTIGTV

SEQ ID NO: 7403 - protein, 9 aa, Severe acute respiratory syndrome coronavirus 2
RIFTIGTVT

SEQ ID NO: 7404 - protein, 10 aa, Severe acute respiratory syndrome coronavirus 2
RIFTIGTVTL

SEQ ID NO: 7405 - protein, 9 aa, Severe acute respiratory syndrome coronavirus 2
IFTIGTVTL

SEQ ID NO: 7406 - protein, 10 aa, Severe acute respiratory syndrome coronavirus 2
IFTIGTVTLK

SEQ ID NO: 7407 - protein, 10 aa, Severe acute respiratory syndrome coronavirus 2
TVTLKQGEIK

SEQ ID NO: 7408 - protein, 9 aa, Severe acute respiratory syndrome coronavirus 2
VTLKQGEIK

SEQ ID NO: 7409 - protein, 10 aa, Severe acute respiratory syndrome coronavirus 2
GEIKDATPSD

SEQ ID NO: 7410 - protein, 9 aa, Severe acute respiratory syndrome coronavirus 2
TPSDFVRAT

SEQ ID NO: 7411 - protein, 10 aa, Severe acute respiratory syndrome coronavirus 2
TPSDFVRATA

SEQ ID NO: 7412 - protein, 9 aa, Severe acute respiratory syndrome coronavirus 2
PSDFVRATA

SEQ ID NO: 7413 - protein, 10 aa, Severe acute respiratory syndrome coronavirus 2
SDFVRATATI

SEQ ID NO: 7414 - protein, 10 aa, Severe acute respiratory syndrome coronavirus 2
FVRATATIPI

SEQ ID NO: 7415 - protein, 9 aa, Severe acute respiratory syndrome coronavirus 2
ATIPIQASL

SEQ ID NO: 7416 - protein, 10 aa, Severe acute respiratory syndrome coronavirus 2
PIQASLPFGW

SEQ ID NO: 7417 - protein, 10 aa, Severe acute respiratory syndrome coronavirus 2
IQASLPFGWL

SEQ ID NO: 7418 - protein, 10 aa, Severe acute respiratory syndrome coronavirus 2
QASLPFGWLI

SEQ ID NO: 7419 - protein, 9 aa, Severe acute respiratory syndrome coronavirus 2
ASLPFGWLI

SEQ ID NO: 7420 - protein, 10 aa, Severe acute respiratory syndrome coronavirus 2
ASLPFGWLIV

SEQ ID NO: 7421 - protein, 9 aa, Severe acute respiratory syndrome coronavirus 2
SLPFGWLIV

SEQ ID NO: 7422 - protein, 10 aa, Severe acute respiratory syndrome coronavirus 2
SLPFGWLIVG

SEQ ID NO: 7423 - protein, 10 aa, Severe acute respiratory syndrome coronavirus 2
LPFGWLIVGV

SEQ ID NO: 7424 - protein, 10 aa, Severe acute respiratory syndrome coronavirus 2
FGWLIVGVAL

SEQ ID NO: 7425 - protein, 10 aa, Severe acute respiratory syndrome coronavirus 2
GWLIVGVALL

SEQ ID NO: 7426 - protein, 10 aa, Severe acute respiratory syndrome coronavirus 2
WLIVGVALLA

SEQ ID NO: 7427 - protein, 10 aa, Severe acute respiratory syndrome coronavirus 2
LIVGVALLAV

SEQ ID NO: 7428 - protein, 9 aa, Severe acute respiratory syndrome coronavirus 2
ALLAVFQSA

SEQ ID NO: 7429 - protein, 10 aa, Severe acute respiratory syndrome coronavirus 2
LLAVFQSASK

SEQ ID NO: 7430 - protein, 10 aa, Severe acute respiratory syndrome coronavirus 2
FQSASKIITL

SEQ ID NO: 7431 - protein, 10 aa, Severe acute respiratory syndrome coronavirus 2
QSASKIITLK

SEQ ID NO: 7432 - protein, 9 aa, Severe acute respiratory syndrome coronavirus 2
SASKIITLK

SEQ ID NO: 7433 - protein, 10 aa, Severe acute respiratory syndrome coronavirus 2
SASKIITLKK

SEQ ID NO: 7434 - protein, 9 aa, Severe acute respiratory syndrome coronavirus 2
ASKIITLKK

SEQ ID NO: 7435 - protein, 9 aa, Severe acute respiratory syndrome coronavirus 2
KIITLKKRW

SEQ ID NO: 7436 - protein, 9 aa, Severe acute respiratory syndrome coronavirus 2
ITLKKRWQL

SEQ ID NO: 7437 - protein, 10 aa, Severe acute respiratory syndrome coronavirus 2
TLKKRWQLAL

SEQ ID NO: 7438 - protein, 9 aa, Severe acute respiratory syndrome coronavirus 2
LKKRWQLAL

SEQ ID NO: 7439 - protein, 9 aa, Severe acute respiratory syndrome coronavirus 2
KRWQLALSK

SEQ ID NO: 7440 - protein, 9 aa, Severe acute respiratory syndrome coronavirus 2
WQLALSKGV

SEQ ID NO: 7441 - protein, 10 aa, Severe acute respiratory syndrome coronavirus 2
QLALSKGVHF

SEQ ID NO: 7442 - protein, 9 aa, Severe acute respiratory syndrome coronavirus 2
LALSKGVHF

SEQ ID NO: 7443 - protein, 9 aa, Severe acute respiratory syndrome coronavirus 2
ALSKGVHFV

SEQ ID NO: 7444 - protein, 10 aa, Severe acute respiratory syndrome coronavirus 2
KGVHFVCNLL

SEQ ID NO: 7445 - protein, 9 aa, Severe acute respiratory syndrome coronavirus 2
GVHFVCNLL

SEQ ID NO: 7446 - protein, 10 aa, Severe acute respiratory syndrome coronavirus 2
GVHFVCNLLL

SEQ ID NO: 7447 - protein, 10 aa, Severe acute respiratory syndrome coronavirus 2
VHFVCNLLLL

SEQ ID NO: 7448 - protein, 10 aa, Severe acute respiratory syndrome coronavirus 2
HFVCNLLLLF

SEQ ID NO: 7449 - protein, 10 aa, Severe acute respiratory syndrome coronavirus 2
FVCNLLLLFV

SEQ ID NO: 7450 - protein, 10 aa, Severe acute respiratory syndrome coronavirus 2
NLLLLFVTVY

SEQ ID NO: 7451 - protein, 9 aa, Severe acute respiratory syndrome coronavirus 2
LLLLFVTVY

SEQ ID NO: 7452 - protein, 10 aa, Severe acute respiratory syndrome coronavirus 2
LLLLFVTVYS

SEQ ID NO: 7453 - protein, 9 aa, Severe acute respiratory syndrome coronavirus 2
LLLFVTVYS

SEQ ID NO: 7454 - protein, 10 aa, Severe acute respiratory syndrome coronavirus 2
LLLFVTVYSH

SEQ ID NO: 7455 - protein, 9 aa, Severe acute respiratory syndrome coronavirus 2
LLFVTVYSH

SEQ ID NO: 7456 - protein, 10 aa, Severe acute respiratory syndrome coronavirus 2
LLFVTVYSHL

SEQ ID NO: 7457 - protein, 9 aa, Severe acute respiratory syndrome coronavirus 2
LFVTVYSHL

SEQ ID NO: 7458 - protein, 10 aa, Severe acute respiratory syndrome coronavirus 2
LFVTVYSHLL

SEQ ID NO: 7459 - protein, 9 aa, Severe acute respiratory syndrome coronavirus 2
FVTVYSHLL

SEQ ID NO: 7460 - protein, 10 aa, Severe acute respiratory syndrome coronavirus 2
FVTVYSHLLL

SEQ ID NO: 7461 - protein, 9 aa, Severe acute respiratory syndrome coronavirus 2
VTVYSHLLL

SEQ ID NO: 7462 - protein, 10 aa, Severe acute respiratory syndrome coronavirus 2
VTVYSHLLLV

SEQ ID NO: 7463 - protein, 10 aa, Severe acute respiratory syndrome coronavirus 2
TVYSHLLLVA

SEQ ID NO: 7464 - protein, 10 aa, Severe acute respiratory syndrome coronavirus 2
VYSHLLLVAA

SEQ ID NO: 7465 - protein, 10 aa, Severe acute respiratory syndrome coronavirus 2
LLLVAAGLEA

SEQ ID NO: 7466 - protein, 9 aa, Severe acute respiratory syndrome coronavirus 2
LLVAAGLEA

SEQ ID NO: 7467 - protein, 9 aa, Severe acute respiratory syndrome coronavirus 2
VAAGLEAPF

SEQ ID NO: 7468 - protein, 10 aa, Severe acute respiratory syndrome coronavirus 2
AAGLEAPFLY

SEQ ID NO: 7469 - protein, 10 aa, Severe acute respiratory syndrome coronavirus 2
AGLEAPFLYL

SEQ ID NO: 7470 - protein, 9 aa, Severe acute respiratory syndrome coronavirus 2
GLEAPFLYL

SEQ ID NO: 7471 - protein, 10 aa, Severe acute respiratory syndrome coronavirus 2
GLEAPFLYLY

SEQ ID NO: 7472 - protein, 9 aa, Severe acute respiratory syndrome coronavirus 2
LEAPFLYLY

SEQ ID NO: 7473 - protein, 10 aa, Severe acute respiratory syndrome coronavirus 2
LEAPFLYLYA

SEQ ID NO: 7474 - protein, 10 aa, Severe acute respiratory syndrome coronavirus 2
EAPFLYLYAL

SEQ ID NO: 7475 - protein, 9 aa, Severe acute respiratory syndrome coronavirus 2
APFLYLYAL

SEQ ID NO: 7476 - protein, 10 aa, Severe acute respiratory syndrome coronavirus 2
APFLYLYALV

SEQ ID NO: 7477 - protein, 9 aa, Severe acute respiratory syndrome coronavirus 2
PFLYLYALV

SEQ ID NO: 7478 - protein, 10 aa, Severe acute respiratory syndrome coronavirus 2
PFLYLYALVY

SEQ ID NO: 7479 - protein, 9 aa, Severe acute respiratory syndrome coronavirus 2
FLYLYALVY

SEQ ID NO: 7480 - protein, 10 aa, Severe acute respiratory syndrome coronavirus 2
FLYLYALVYF

SEQ ID NO: 7481 - protein, 9 aa, Severe acute respiratory syndrome coronavirus 2
LYLYALVYF

SEQ ID NO: 7482 - protein, 10 aa, Severe acute respiratory syndrome coronavirus 2
LYLYALVYFL

SEQ ID NO: 7483 - protein, 9 aa, Severe acute respiratory syndrome coronavirus 2
YLYALVYFL

SEQ ID NO: 7484 - protein, 10 aa, Severe acute respiratory syndrome coronavirus 2
YLYALVYFLQ

SEQ ID NO: 7485 - protein, 10 aa, Severe acute respiratory syndrome coronavirus 2
LYALVYFLQS

SEQ ID NO: 7486 - protein, 10 aa, Severe acute respiratory syndrome coronavirus 2
YALVYFLQSI

SEQ ID NO: 7487 - protein, 9 aa, Severe acute respiratory syndrome coronavirus 2
ALVYFLQSI

SEQ ID NO: 7488 - protein, 9 aa, Severe acute respiratory syndrome coronavirus 2
VYFLQSINF

SEQ ID NO: 7489 - protein, 10 aa, Severe acute respiratory syndrome coronavirus 2
VYFLQSINFV

SEQ ID NO: 7490 - protein, 9 aa, Severe acute respiratory syndrome coronavirus 2
YFLQSINFV

SEQ ID NO: 7491 - protein, 10 aa, Severe acute respiratory syndrome coronavirus 2
YFLQSINFVR

SEQ ID NO: 7492 - protein, 9 aa, Severe acute respiratory syndrome coronavirus 2
FLQSINFVR

SEQ ID NO: 7493 - protein, 10 aa, Severe acute respiratory syndrome coronavirus 2
FLQSINFVRI

SEQ ID NO: 7494 - protein, 9 aa, Severe acute respiratory syndrome coronavirus 2
QSINFVRII

SEQ ID NO: 7495 - protein, 9 aa, Severe acute respiratory syndrome coronavirus 2
SINFVRIIM

SEQ ID NO: 7496 - protein, 10 aa, Severe acute respiratory syndrome coronavirus 2
SINFVRIIMR

SEQ ID NO: 7497 - protein, 9 aa, Severe acute respiratory syndrome coronavirus 2
INFVRIIMR

SEQ ID NO: 7498 - protein, 9 aa, Severe acute respiratory syndrome coronavirus 2
NFVRIIMRL

SEQ ID NO: 7499 - protein, 10 aa, Severe acute respiratory syndrome coronavirus 2
NFVRIIMRLW

SEQ ID NO: 7500 - protein, 10 aa, Severe acute respiratory syndrome coronavirus 2
FVRIIMRLWL

SEQ ID NO: 7501 - protein, 9 aa, Severe acute respiratory syndrome coronavirus 2
VRIIMRLWL

SEQ ID NO: 7502 - protein, 10 aa, Severe acute respiratory syndrome coronavirus 2
RIIMRLWLCW

SEQ ID NO: 7503 - protein, 9 aa, Severe acute respiratory syndrome coronavirus 2
IIMRLWLCW

SEQ ID NO: 7504 - protein, 10 aa, Severe acute respiratory syndrome coronavirus 2
IIMRLWLCWK

SEQ ID NO: 7505 - protein, 9 aa, Severe acute respiratory syndrome coronavirus 2
IMRLWLCWK

SEQ ID NO: 7506 - protein, 10 aa, Severe acute respiratory syndrome coronavirus 2
IMRLWLCWKC

SEQ ID NO: 7507 - protein, 9 aa, Severe acute respiratory syndrome coronavirus 2
RLWLCWKCR

SEQ ID NO: 7508 - protein, 10 aa, Severe acute respiratory syndrome coronavirus 2
LWLCWKCRSK

SEQ ID NO: 7509 - protein, 9 aa, Severe acute respiratory syndrome coronavirus 2
WLCWKCRSK

SEQ ID NO: 7510 - protein, 10 aa, Severe acute respiratory syndrome coronavirus 2
CWKCRSKNPL

SEQ ID NO: 7511 - protein, 10 aa, Severe acute respiratory syndrome coronavirus 2
KCRSKNPLLY

SEQ ID NO: 7512 - protein, 9 aa, Severe acute respiratory syndrome coronavirus 2
CRSKNPLLY

SEQ ID NO: 7513 - protein, 10 aa, Severe acute respiratory syndrome coronavirus 2
NPLLYDANYF

SEQ ID NO: 7514 - protein, 9 aa, Severe acute respiratory syndrome coronavirus 2
PLLYDANYF

SEQ ID NO: 7515 - protein, 10 aa, Severe acute respiratory syndrome coronavirus 2
PLLYDANYFL

SEQ ID NO: 7516 - protein, 9 aa, Severe acute respiratory syndrome coronavirus 2
LLYDANYFL

SEQ ID NO: 7517 - protein, 10 aa, Severe acute respiratory syndrome coronavirus 2
LLYDANYFLC

SEQ ID NO: 7518 - protein, 9 aa, Severe acute respiratory syndrome coronavirus 2
LYDANYFLC

SEQ ID NO: 7519 - protein, 10 aa, Severe acute respiratory syndrome coronavirus 2
LYDANYFLCW

SEQ ID NO: 7520 - protein, 9 aa, Severe acute respiratory syndrome coronavirus 2
YDANYFLCW

SEQ ID NO: 7521 - protein, 10 aa, Severe acute respiratory syndrome coronavirus 2
ANYFLCWHTN

SEQ ID NO: 7522 - protein, 9 aa, Severe acute respiratory syndrome coronavirus 2
NYFLCWHTN

SEQ ID NO: 7523 - protein, 10 aa, Severe acute respiratory syndrome coronavirus 2
NYFLCWHTNC

SEQ ID NO: 7524 - protein, 9 aa, Severe acute respiratory syndrome coronavirus 2
YFLCWHTNC

SEQ ID NO: 7525 - protein, 10 aa, Severe acute respiratory syndrome coronavirus 2
YFLCWHTNCY

SEQ ID NO: 7526 - protein, 9 aa, Severe acute respiratory syndrome coronavirus 2
FLCWHTNCY

SEQ ID NO: 7527 - protein, 10 aa, Severe acute respiratory syndrome coronavirus 2
FLCWHTNCYD

SEQ ID NO: 7528 - protein, 10 aa, Severe acute respiratory syndrome coronavirus 2
LCWHTNCYDY

SEQ ID NO: 7529 - protein, 9 aa, Severe acute respiratory syndrome coronavirus 2
CWHTNCYDY

SEQ ID NO: 7530 - protein, 10 aa, Severe acute respiratory syndrome coronavirus 2
WHTNCYDYCI

SEQ ID NO: 7531 - protein, 9 aa, Severe acute respiratory syndrome coronavirus 2
HTNCYDYCI

SEQ ID NO: 7532 - protein, 9 aa, Severe acute respiratory syndrome coronavirus 2
NCYDYCIPY

SEQ ID NO: 7533 - protein, 9 aa, Severe acute respiratory syndrome coronavirus 2
CYDYCIPYN

SEQ ID NO: 7534 - protein, 10 aa, Severe acute respiratory syndrome coronavirus 2
CYDYCIPYNS

SEQ ID NO: 7535 - protein, 10 aa, Severe acute respiratory syndrome coronavirus 2
YDYCIPYNSV

SEQ ID NO: 7536 - protein, 10 aa, Severe acute respiratory syndrome coronavirus 2
DYCIPYNSVT

SEQ ID NO: 7537 - protein, 10 aa, Severe acute respiratory syndrome coronavirus 2
IPYNSVTSSI

SEQ ID NO: 7538 - protein, 10 aa, Severe acute respiratory syndrome coronavirus 2
PYNSVTSSIV

SEQ ID NO: 7539 - protein, 9 aa, Severe acute respiratory syndrome coronavirus 2
ITSGDGTTS

SEQ ID NO: 7540 - protein, 10 aa, Severe acute respiratory syndrome coronavirus 2
TSGDGTTSPI

SEQ ID NO: 7541 - protein, 9 aa, Severe acute respiratory syndrome coronavirus 2
GTTSPISEH

SEQ ID NO: 7542 - protein, 10 aa, Severe acute respiratory syndrome coronavirus 2
TTSPISEHDY

SEQ ID NO: 7543 - protein, 9 aa, Severe acute respiratory syndrome coronavirus 2
TSPISEHDY

SEQ ID NO: 7544 - protein, 10 aa, Severe acute respiratory syndrome coronavirus 2
TSPISEHDYQ

SEQ ID NO: 7545 - protein, 10 aa, Severe acute respiratory syndrome coronavirus 2
SPISEHDYQI

SEQ ID NO: 7546 - protein, 10 aa, Severe acute respiratory syndrome coronavirus 2
ISEHDYQIGG

SEQ ID NO: 7547 - protein, 9 aa, Severe acute respiratory syndrome coronavirus 2
SEHDYQIGG

SEQ ID NO: 7548 - protein, 10 aa, Severe acute respiratory syndrome coronavirus 2
SEHDYQIGGY

SEQ ID NO: 7549 - protein, 9 aa, Severe acute respiratory syndrome coronavirus 2
EHDYQIGGY

SEQ ID NO: 7550 - protein, 9 aa, Severe acute respiratory syndrome coronavirus 2
YQIGGYTEK

SEQ ID NO: 7551 - protein, 9 aa, Severe acute respiratory syndrome coronavirus 2
QIGGYTEKW

SEQ ID NO: 7552 - protein, 9 aa, Severe acute respiratory syndrome coronavirus 2
YTEKWESGV

SEQ ID NO: 7553 - protein, 10 aa, Severe acute respiratory syndrome coronavirus 2
YTEKWESGVK

SEQ ID NO: 7554 - protein, 9 aa, Severe acute respiratory syndrome coronavirus 2
WESGVKDCV

SEQ ID NO: 7555 - protein, 9 aa, Severe acute respiratory syndrome coronavirus 2
ESGVKDCVV

SEQ ID NO: 7556 - protein, 9 aa, Severe acute respiratory syndrome coronavirus 2
GVKDCVVLH

SEQ ID NO: 7557 - protein, 10 aa, Severe acute respiratory syndrome coronavirus 2
VKDCVVLHSY

SEQ ID NO: 7558 - protein, 9 aa, Severe acute respiratory syndrome coronavirus 2
KDCVVLHSY

SEQ ID NO: 7559 - protein, 10 aa, Severe acute respiratory syndrome coronavirus 2
KDCVVLHSYF

SEQ ID NO: 7560 - protein, 9 aa, Severe acute respiratory syndrome coronavirus 2
VLHSYFTSD

SEQ ID NO: 7561 - protein, 10 aa, Severe acute respiratory syndrome coronavirus 2
VLHSYFTSDY

SEQ ID NO: 7562 - protein, 9 aa, Severe acute respiratory syndrome coronavirus 2
LHSYFTSDY

SEQ ID NO: 7563 - protein, 10 aa, Severe acute respiratory syndrome coronavirus 2
LHSYFTSDYY

SEQ ID NO: 7564 - protein, 9 aa, Severe acute respiratory syndrome coronavirus 2
HSYFTSDYY

SEQ ID NO: 7565 - protein, 9 aa, Severe acute respiratory syndrome coronavirus 2
SYFTSDYYQ

SEQ ID NO: 7566 - protein, 10 aa, Severe acute respiratory syndrome coronavirus 2
SYFTSDYYQL

SEQ ID NO: 7567 - protein, 9 aa, Severe acute respiratory syndrome coronavirus 2
YFTSDYYQL

SEQ ID NO: 7568 - protein, 10 aa, Severe acute respiratory syndrome coronavirus 2
YFTSDYYQLY

SEQ ID NO: 7569 - protein, 9 aa, Severe acute respiratory syndrome coronavirus 2
FTSDYYQLY

SEQ ID NO: 7570 - protein, 10 aa, Severe acute respiratory syndrome coronavirus 2
FTSDYYQLYS

SEQ ID NO: 7571 - protein, 9 aa, Severe acute respiratory syndrome coronavirus 2
TSDYYQLYS

SEQ ID NO: 7572 - protein, 10 aa, Severe acute respiratory syndrome coronavirus 2
TSDYYQLYST

SEQ ID NO: 7573 - protein, 9 aa, Severe acute respiratory syndrome coronavirus 2
DYYQLYSTQ

SEQ ID NO: 7574 - protein, 10 aa, Severe acute respiratory syndrome coronavirus 2
DYYQLYSTQL

SEQ ID NO: 7575 - protein, 9 aa, Severe acute respiratory syndrome coronavirus 2
YYQLYSTQL

SEQ ID NO: 7576 - protein, 10 aa, Severe acute respiratory syndrome coronavirus 2
YYQLYSTQLS

SEQ ID NO: 7577 - protein, 10 aa, Severe acute respiratory syndrome coronavirus 2
YQLYSTQLST

SEQ ID NO: 7578 - protein, 9 aa, Severe acute respiratory syndrome coronavirus 2
QLYSTQLST

SEQ ID NO: 7579 - protein, 10 aa, Severe acute respiratory syndrome coronavirus 2
YSTQLSTDTG

SEQ ID NO: 7580 - protein, 10 aa, Severe acute respiratory syndrome coronavirus 2
STQLSTDTGV

SEQ ID NO: 7581 - protein, 9 aa, Severe acute respiratory syndrome coronavirus 2
TQLSTDTGV

SEQ ID NO: 7582 - protein, 9 aa, Severe acute respiratory syndrome coronavirus 2
LSTDTGVEH

SEQ ID NO: 7583 - protein, 9 aa, Severe acute respiratory syndrome coronavirus 2
STDTGVEHV

SEQ ID NO: 7584 - protein, 10 aa, Severe acute respiratory syndrome coronavirus 2
STDTGVEHVT

SEQ ID NO: 7585 - protein, 10 aa, Severe acute respiratory syndrome coronavirus 2
TDTGVEHVTF

SEQ ID NO: 7586 - protein, 9 aa, Severe acute respiratory syndrome coronavirus 2
DTGVEHVTF

SEQ ID NO: 7587 - protein, 10 aa, Severe acute respiratory syndrome coronavirus 2
DTGVEHVTFF

SEQ ID NO: 7588 - protein, 10 aa, Severe acute respiratory syndrome coronavirus 2
TGVEHVTFFI

SEQ ID NO: 7589 - protein, 9 aa, Severe acute respiratory syndrome coronavirus 2
GVEHVTFFI

SEQ ID NO: 7590 - protein, 10 aa, Severe acute respiratory syndrome coronavirus 2
GVEHVTFFIY

SEQ ID NO: 7591 - protein, 9 aa, Severe acute respiratory syndrome coronavirus 2
VEHVTFFIY

SEQ ID NO: 7592 - protein, 9 aa, Severe acute respiratory syndrome coronavirus 2
HVTFFIYNK

SEQ ID NO: 7593 - protein, 9 aa, Severe acute respiratory syndrome coronavirus 2
VTFFIYNKI

SEQ ID NO: 7594 - protein, 10 aa, Severe acute respiratory syndrome coronavirus 2
TFFIYNKIVD

SEQ ID NO: 7595 - protein, 9 aa, Severe acute respiratory syndrome coronavirus 2
IYNKIVDEP

SEQ ID NO: 7596 - protein, 10 aa, Severe acute respiratory syndrome coronavirus 2
IYNKIVDEPE

SEQ ID NO: 7597 - protein, 10 aa, Severe acute respiratory syndrome coronavirus 2
IVDEPEEHVQ

SEQ ID NO: 7598 - protein, 9 aa, Severe acute respiratory syndrome coronavirus 2
DEPEEHVQI

SEQ ID NO: 7599 - protein, 10 aa, Severe acute respiratory syndrome coronavirus 2
PEEHVQIHTI

SEQ ID NO: 7600 - protein, 9 aa, Severe acute respiratory syndrome coronavirus 2
EEHVQIHTI

SEQ ID NO: 7601 - protein, 9 aa, Severe acute respiratory syndrome coronavirus 2
HTIDGSSGV

SEQ ID NO: 7602 - protein, 10 aa, Severe acute respiratory syndrome coronavirus 2
HTIDGSSGVV

SEQ ID NO: 7603 - protein, 9 aa, Severe acute respiratory syndrome coronavirus 2
TIDGSSGVV

SEQ ID NO: 7604 - protein, 9 aa, Severe acute respiratory syndrome coronavirus 2
GSSGVVNPV

SEQ ID NO: 7605 - protein, 10 aa, Severe acute respiratory syndrome coronavirus 2
GSSGVVNPVM

SEQ ID NO: 7606 - protein, 9 aa, Severe acute respiratory syndrome coronavirus 2
VVNPVMEPI

SEQ ID NO: 7607 - protein, 10 aa, Severe acute respiratory syndrome coronavirus 2
VVNPVMEPIY

SEQ ID NO: 7608 - protein, 10 aa, Severe acute respiratory syndrome coronavirus 2
MEPIYDEPTT

SEQ ID NO: 7609 - protein, 10 aa, Severe acute respiratory syndrome coronavirus 2
IYDEPTTTTS

SEQ ID NO: 7610 - protein, 10 aa, Severe acute respiratory syndrome coronavirus 2
EPTTTTSVPL

SEQ ID NO: 7611 - protein, 10 aa, Severe acute respiratory syndrome coronavirus 2
FHLVDFQVTI

SEQ ID NO: 7612 - protein, 9 aa, Severe acute respiratory syndrome coronavirus 2
HLVDFQVTI

SEQ ID NO: 7613 - protein, 10 aa, Severe acute respiratory syndrome coronavirus 2
LVDFQVTIAE

SEQ ID NO: 7614 - protein, 10 aa, Severe acute respiratory syndrome coronavirus 2
VDFQVTIAEI

SEQ ID NO: 7615 - protein, 10 aa, Severe acute respiratory syndrome coronavirus 2
DFQVTIAEIL

SEQ ID NO: 7616 - protein, 10 aa, Severe acute respiratory syndrome coronavirus 2
FQVTIAEILL

SEQ ID NO: 7617 - protein, 9 aa, Severe acute respiratory syndrome coronavirus 2
VTIAEILLI

SEQ ID NO: 7618 - protein, 10 aa, Severe acute respiratory syndrome coronavirus 2
VTIAEILLII

SEQ ID NO: 7619 - protein, 9 aa, Severe acute respiratory syndrome coronavirus 2
TIAEILLII

SEQ ID NO: 7620 - protein, 10 aa, Severe acute respiratory syndrome coronavirus 2
TIAEILLIIM

SEQ ID NO: 7621 - protein, 9 aa, Severe acute respiratory syndrome coronavirus 2
AEILLIIMR

SEQ ID NO: 7622 - protein, 10 aa, Severe acute respiratory syndrome coronavirus 2
AEILLIIMRT

SEQ ID NO: 7623 - protein, 9 aa, Severe acute respiratory syndrome coronavirus 2
ILLIIMRTF

SEQ ID NO: 7624 - protein, 10 aa, Severe acute respiratory syndrome coronavirus 2
ILLIIMRTFK

SEQ ID NO: 7625 - protein, 9 aa, Severe acute respiratory syndrome coronavirus 2
LLIIMRTFK

SEQ ID NO: 7626 - protein, 10 aa, Severe acute respiratory syndrome coronavirus 2
LLIIMRTFKV

SEQ ID NO: 7627 - protein, 9 aa, Severe acute respiratory syndrome coronavirus 2
LIIMRTFKV

SEQ ID NO: 7628 - protein, 10 aa, Severe acute respiratory syndrome coronavirus 2
IIMRTFKVSI

SEQ ID NO: 7629 - protein, 9 aa, Severe acute respiratory syndrome coronavirus 2
IMRTFKVSI

SEQ ID NO: 7630 - protein, 10 aa, Severe acute respiratory syndrome coronavirus 2
IMRTFKVSIW

SEQ ID NO: 7631 - protein, 9 aa, Severe acute respiratory syndrome coronavirus 2
MRTFKVSIW

SEQ ID NO: 7632 - protein, 9 aa, Severe acute respiratory syndrome coronavirus 2
RTFKVSIWN

SEQ ID NO: 7633 - protein, 10 aa, Severe acute respiratory syndrome coronavirus 2
RTFKVSIWNL

SEQ ID NO: 7634 - protein, 9 aa, Severe acute respiratory syndrome coronavirus 2
TFKVSIWNL

SEQ ID NO: 7635 - protein, 10 aa, Severe acute respiratory syndrome coronavirus 2
TFKVSIWNLD

SEQ ID NO: 7636 - protein, 9 aa, Severe acute respiratory syndrome coronavirus 2
KVSIWNLDY

SEQ ID NO: 7637 - protein, 10 aa, Severe acute respiratory syndrome coronavirus 2
KVSIWNLDYI

SEQ ID NO: 7638 - protein, 9 aa, Severe acute respiratory syndrome coronavirus 2
VSIWNLDYI

SEQ ID NO: 7639 - protein, 9 aa, Severe acute respiratory syndrome coronavirus 2
SIWNLDYII

SEQ ID NO: 7640 - protein, 10 aa, Severe acute respiratory syndrome coronavirus 2
IWNLDYIINL

SEQ ID NO: 7641 - protein, 9 aa, Severe acute respiratory syndrome coronavirus 2
WNLDYIINL

SEQ ID NO: 7642 - protein, 10 aa, Severe acute respiratory syndrome coronavirus 2
WNLDYIINLI

SEQ ID NO: 7643 - protein, 9 aa, Severe acute respiratory syndrome coronavirus 2
NLDYIINLI

SEQ ID NO: 7644 - protein, 10 aa, Severe acute respiratory syndrome coronavirus 2
NLDYIINLII

SEQ ID NO: 7645 - protein, 10 aa, Severe acute respiratory syndrome coronavirus 2
LDYIINLIIK

SEQ ID NO: 7646 - protein, 10 aa, Severe acute respiratory syndrome coronavirus 2
YIINLIIKNL

SEQ ID NO: 7647 - protein, 10 aa, Severe acute respiratory syndrome coronavirus 2
INLIIKNLSK

SEQ ID NO: 7648 - protein, 9 aa, Severe acute respiratory syndrome coronavirus 2
NLIIKNLSK

SEQ ID NO: 7649 - protein, 9 aa, Severe acute respiratory syndrome coronavirus 2
IIKNLSKSL

SEQ ID NO: 7650 - protein, 10 aa, Severe acute respiratory syndrome coronavirus 2
NLSKSLTENK

SEQ ID NO: 7651 - protein, 9 aa, Severe acute respiratory syndrome coronavirus 2
LSKSLTENK

SEQ ID NO: 7652 - protein, 10 aa, Severe acute respiratory syndrome coronavirus 2
LSKSLTENKY

SEQ ID NO: 7653 - protein, 10 aa, Severe acute respiratory syndrome coronavirus 2
SLTENKYSQL

SEQ ID NO: 7654 - protein, 9 aa, Severe acute respiratory syndrome coronavirus 2
LTENKYSQL

SEQ ID NO: 7655 - protein, 10 aa, Severe acute respiratory syndrome coronavirus 2
LTENKYSQLD

SEQ ID NO: 7656 - protein, 9 aa, Severe acute respiratory syndrome coronavirus 2
TENKYSQLD

SEQ ID NO: 7657 - protein, 10 aa, Severe acute respiratory syndrome coronavirus 2
QLDEEQPMEI

SEQ ID NO: 7658 - protein, 9 aa, Severe acute respiratory syndrome coronavirus 2
MKIILFLAL

SEQ ID NO: 7659 - protein, 10 aa, Severe acute respiratory syndrome coronavirus 2
MKIILFLALI

SEQ ID NO: 7660 - protein, 10 aa, Severe acute respiratory syndrome coronavirus 2
IILFLALITL

SEQ ID NO: 7661 - protein, 10 aa, Severe acute respiratory syndrome coronavirus 2
ILFLALITLA

SEQ ID NO: 7662 - protein, 10 aa, Severe acute respiratory syndrome coronavirus 2
LFLALITLAT

SEQ ID NO: 7663 - protein, 10 aa, Severe acute respiratory syndrome coronavirus 2
FLALITLATC

SEQ ID NO: 7664 - protein, 10 aa, Severe acute respiratory syndrome coronavirus 2
ALITLATCEL

SEQ ID NO: 7665 - protein, 9 aa, Severe acute respiratory syndrome coronavirus 2
LITLATCEL

SEQ ID NO: 7666 - protein, 10 aa, Severe acute respiratory syndrome coronavirus 2
LITLATCELY

SEQ ID NO: 7667 - protein, 9 aa, Severe acute respiratory syndrome coronavirus 2
ITLATCELY

SEQ ID NO: 7668 - protein, 10 aa, Severe acute respiratory syndrome coronavirus 2
ITLATCELYH

SEQ ID NO: 7669 - protein, 9 aa, Severe acute respiratory syndrome coronavirus 2
TLATCELYH

SEQ ID NO: 7670 - protein, 10 aa, Severe acute respiratory syndrome coronavirus 2
TLATCELYHY

SEQ ID NO: 7671 - protein, 9 aa, Severe acute respiratory syndrome coronavirus 2
LATCELYHY

SEQ ID NO: 7672 - protein, 10 aa, Severe acute respiratory syndrome coronavirus 2
ATCELYHYQE

SEQ ID NO: 7673 - protein, 10 aa, Severe acute respiratory syndrome coronavirus 2
TCELYHYQEC

SEQ ID NO: 7674 - protein, 9 aa, Severe acute respiratory syndrome coronavirus 2
ELYHYQECV

SEQ ID NO: 7675 - protein, 9 aa, Severe acute respiratory syndrome coronavirus 2
HYQECVRGT

SEQ ID NO: 7676 - protein, 10 aa, Severe acute respiratory syndrome coronavirus 2
HYQECVRGTT

SEQ ID NO: 7677 - protein, 10 aa, Severe acute respiratory syndrome coronavirus 2
YQECVRGTTV

SEQ ID NO: 7678 - protein, 9 aa, Severe acute respiratory syndrome coronavirus 2
QECVRGTTV

SEQ ID NO: 7679 - protein, 10 aa, Severe acute respiratory syndrome coronavirus 2
QECVRGTTVL

SEQ ID NO: 7680 - protein, 10 aa, Severe acute respiratory syndrome coronavirus 2
CVRGTTVLLK

SEQ ID NO: 7681 - protein, 9 aa, Severe acute respiratory syndrome coronavirus 2
VRGTTVLLK

SEQ ID NO: 7682 - protein, 10 aa, Severe acute respiratory syndrome coronavirus 2
LKEPCSSGTY

SEQ ID NO: 7683 - protein, 9 aa, Severe acute respiratory syndrome coronavirus 2
KEPCSSGTY

SEQ ID NO: 7684 - protein, 10 aa, Severe acute respiratory syndrome coronavirus 2
KEPCSSGTYE

SEQ ID NO: 7685 - protein, 10 aa, Severe acute respiratory syndrome coronavirus 2
EPCSSGTYEG

SEQ ID NO: 7686 - protein, 10 aa, Severe acute respiratory syndrome coronavirus 2
SGTYEGNSPF

SEQ ID NO: 7687 - protein, 9 aa, Severe acute respiratory syndrome coronavirus 2
GTYEGNSPF

SEQ ID NO: 7688 - protein, 10 aa, Severe acute respiratory syndrome coronavirus 2
YEGNSPFHPL

SEQ ID NO: 7689 - protein, 10 aa, Severe acute respiratory syndrome coronavirus 2
PFHPLADNKF

SEQ ID NO: 7690 - protein, 9 aa, Severe acute respiratory syndrome coronavirus 2
FHPLADNKF

SEQ ID NO: 7691 - protein, 9 aa, Severe acute respiratory syndrome coronavirus 2
HPLADNKFA

SEQ ID NO: 7692 - protein, 10 aa, Severe acute respiratory syndrome coronavirus 2
HPLADNKFAL

SEQ ID NO: 7693 - protein, 9 aa, Severe acute respiratory syndrome coronavirus 2
LADNKFALT

SEQ ID NO: 7694 - protein, 9 aa, Severe acute respiratory syndrome coronavirus 2
ADNKFALTC

SEQ ID NO: 7695 - protein, 10 aa, Severe acute respiratory syndrome coronavirus 2
ADNKFALTCF

SEQ ID NO: 7696 - protein, 10 aa, Severe acute respiratory syndrome coronavirus 2
FALTCFSTQF

SEQ ID NO: 7697 - protein, 9 aa, Severe acute respiratory syndrome coronavirus 2
ALTCFSTQF

SEQ ID NO: 7698 - protein, 10 aa, Severe acute respiratory syndrome coronavirus 2
ALTCFSTQFA

SEQ ID NO: 7699 - protein, 9 aa, Severe acute respiratory syndrome coronavirus 2
LTCFSTQFA

SEQ ID NO: 7700 - protein, 10 aa, Severe acute respiratory syndrome coronavirus 2
LTCFSTQFAF

SEQ ID NO: 7701 - protein, 9 aa, Severe acute respiratory syndrome coronavirus 2
TCFSTQFAF

SEQ ID NO: 7702 - protein, 9 aa, Severe acute respiratory syndrome coronavirus 2
FAFACPDGV

SEQ ID NO: 7703 - protein, 10 aa, Severe acute respiratory syndrome coronavirus 2
FAFACPDGVK

SEQ ID NO: 7704 - protein, 10 aa, Severe acute respiratory syndrome coronavirus 2
ACPDGVKHVY

SEQ ID NO: 7705 - protein, 9 aa, Severe acute respiratory syndrome coronavirus 2
CPDGVKHVY

SEQ ID NO: 7706 - protein, 10 aa, Severe acute respiratory syndrome coronavirus 2
CPDGVKHVYQ

SEQ ID NO: 7707 - protein, 9 aa, Severe acute respiratory syndrome coronavirus 2
GVKHVYQLR

SEQ ID NO: 7708 - protein, 10 aa, Severe acute respiratory syndrome coronavirus 2
HVYQLRARSV

SEQ ID NO: 7709 - protein, 9 aa, Severe acute respiratory syndrome coronavirus 2
VYQLRARSV

SEQ ID NO: 7710 - protein, 10 aa, Severe acute respiratory syndrome coronavirus 2
VYQLRARSVS

SEQ ID NO: 7711 - protein, 10 aa, Severe acute respiratory syndrome coronavirus 2
QLRARSVSPK

SEQ ID NO: 7712 - protein, 9 aa, Severe acute respiratory syndrome coronavirus 2
LRARSVSPK

SEQ ID NO: 7713 - protein, 9 aa, Severe acute respiratory syndrome coronavirus 2
RARSVSPKL

SEQ ID NO: 7714 - protein, 10 aa, Severe acute respiratory syndrome coronavirus 2
RSVSPKLFIR

SEQ ID NO: 7715 - protein, 9 aa, Severe acute respiratory syndrome coronavirus 2
SVSPKLFIR

SEQ ID NO: 7716 - protein, 9 aa, Severe acute respiratory syndrome coronavirus 2
KLFIRQEEV

SEQ ID NO: 7717 - protein, 10 aa, Severe acute respiratory syndrome coronavirus 2
IRQEEVQELY

SEQ ID NO: 7718 - protein, 9 aa, Severe acute respiratory syndrome coronavirus 2
RQEEVQELY

SEQ ID NO: 7719 - protein, 10 aa, Severe acute respiratory syndrome coronavirus 2
QEEVQELYSP

SEQ ID NO: 7720 - protein, 9 aa, Severe acute respiratory syndrome coronavirus 2
EEVQELYSP

SEQ ID NO: 7721 - protein, 10 aa, Severe acute respiratory syndrome coronavirus 2
EEVQELYSPI

SEQ ID NO: 7722 - protein, 10 aa, Severe acute respiratory syndrome coronavirus 2
VQELYSPIFL

SEQ ID NO: 7723 - protein, 9 aa, Severe acute respiratory syndrome coronavirus 2
QELYSPIFL

SEQ ID NO: 7724 - protein, 10 aa, Severe acute respiratory syndrome coronavirus 2
QELYSPIFLI

SEQ ID NO: 7725 - protein, 9 aa, Severe acute respiratory syndrome coronavirus 2
ELYSPIFLI

SEQ ID NO: 7726 - protein, 10 aa, Severe acute respiratory syndrome coronavirus 2
ELYSPIFLIV

SEQ ID NO: 7727 - protein, 9 aa, Severe acute respiratory syndrome coronavirus 2
LYSPIFLIV

SEQ ID NO: 7728 - protein, 10 aa, Severe acute respiratory syndrome coronavirus 2
LYSPIFLIVA

SEQ ID NO: 7729 - protein, 9 aa, Severe acute respiratory syndrome coronavirus 2
SPIFLIVAA

SEQ ID NO: 7730 - protein, 10 aa, Severe acute respiratory syndrome coronavirus 2
SPIFLIVAAI

SEQ ID NO: 7731 - protein, 10 aa, Severe acute respiratory syndrome coronavirus 2
IFLIVAAIVF

SEQ ID NO: 7732 - protein, 10 aa, Severe acute respiratory syndrome coronavirus 2
FLIVAAIVFI

SEQ ID NO: 7733 - protein, 10 aa, Severe acute respiratory syndrome coronavirus 2
IVAAIVFITL

SEQ ID NO: 7734 - protein, 9 aa, Severe acute respiratory syndrome coronavirus 2
VAAIVFITL

SEQ ID NO: 7735 - protein, 10 aa, Severe acute respiratory syndrome coronavirus 2
AAIVFITLCF

SEQ ID NO: 7736 - protein, 9 aa, Severe acute respiratory syndrome coronavirus 2
AIVFITLCF

SEQ ID NO: 7737 - protein, 10 aa, Severe acute respiratory syndrome coronavirus 2
AIVFITLCFT

SEQ ID NO: 7738 - protein, 9 aa, Severe acute respiratory syndrome coronavirus 2
IVFITLCFT

SEQ ID NO: 7739 - protein, 10 aa, Severe acute respiratory syndrome coronavirus 2
IVFITLCFTL

SEQ ID NO: 7740 - protein, 9 aa, Severe acute respiratory syndrome coronavirus 2
VFITLCFTL

SEQ ID NO: 7741 - protein, 10 aa, Severe acute respiratory syndrome coronavirus 2
VFITLCFTLK

SEQ ID NO: 7742 - protein, 9 aa, Severe acute respiratory syndrome coronavirus 2
FITLCFTLK

SEQ ID NO: 7743 - protein, 10 aa, Severe acute respiratory syndrome coronavirus 2
FITLCFTLKR

SEQ ID NO: 7744 - protein, 9 aa, Severe acute respiratory syndrome coronavirus 2
ITLCFTLKR

SEQ ID NO: 7745 - protein, 10 aa, Severe acute respiratory syndrome coronavirus 2
ITLCFTLKRK

SEQ ID NO: 7746 - protein, 9 aa, Severe acute respiratory syndrome coronavirus 2
TLCFTLKRK

SEQ ID NO: 7747 - protein, 9 aa, Severe acute respiratory syndrome coronavirus 2
KFLVFLGII

SEQ ID NO: 7748 - protein, 9 aa, Severe acute respiratory syndrome coronavirus 2
FLVFLGIIT

SEQ ID NO: 7749 - protein, 10 aa, Severe acute respiratory syndrome coronavirus 2
FLVFLGIITT

SEQ ID NO: 7750 - protein, 10 aa, Severe acute respiratory syndrome coronavirus 2
LVFLGIITTV

SEQ ID NO: 7751 - protein, 9 aa, Severe acute respiratory syndrome coronavirus 2
VFLGIITTV

SEQ ID NO: 7752 - protein, 10 aa, Severe acute respiratory syndrome coronavirus 2
VFLGIITTVA

SEQ ID NO: 7753 - protein, 9 aa, Severe acute respiratory syndrome coronavirus 2
FLGIITTVA

SEQ ID NO: 7754 - protein, 10 aa, Severe acute respiratory syndrome coronavirus 2
FLGIITTVAA

SEQ ID NO: 7755 - protein, 10 aa, Severe acute respiratory syndrome coronavirus 2
LGIITTVAAF

SEQ ID NO: 7756 - protein, 9 aa, Severe acute respiratory syndrome coronavirus 2
IITTVAAFH

SEQ ID NO: 7757 - protein, 10 aa, Severe acute respiratory syndrome coronavirus 2
QECSLQSCTQ

SEQ ID NO: 7758 - protein, 9 aa, Severe acute respiratory syndrome coronavirus 2
CSLQSCTQH

SEQ ID NO: 7759 - protein, 9 aa, Severe acute respiratory syndrome coronavirus 2
QSCTQHQPY

SEQ ID NO: 7760 - protein, 9 aa, Severe acute respiratory syndrome coronavirus 2
CTQHQPYVV

SEQ ID NO: 7761 - protein, 10 aa, Severe acute respiratory syndrome coronavirus 2
PYVVDDPCPI

SEQ ID NO: 7762 - protein, 9 aa, Severe acute respiratory syndrome coronavirus 2
YVVDDPCPI

SEQ ID NO: 7763 - protein, 9 aa, Severe acute respiratory syndrome coronavirus 2
VVDDPCPIH

SEQ ID NO: 7764 - protein, 10 aa, Severe acute respiratory syndrome coronavirus 2
VVDDPCPIHF

SEQ ID NO: 7765 - protein, 10 aa, Severe acute respiratory syndrome coronavirus 2
VDDPCPIHFY

SEQ ID NO: 7766 - protein, 10 aa, Severe acute respiratory syndrome coronavirus 2
PCPIHFYSKW

SEQ ID NO: 7767 - protein, 9 aa, Severe acute respiratory syndrome coronavirus 2
CPIHFYSKW

SEQ ID NO: 7768 - protein, 10 aa, Severe acute respiratory syndrome coronavirus 2
CPIHFYSKWY

SEQ ID NO: 7769 - protein, 9 aa, Severe acute respiratory syndrome coronavirus 2
PIHFYSKWY

SEQ ID NO: 7770 - protein, 9 aa, Severe acute respiratory syndrome coronavirus 2
IHFYSKWYI

SEQ ID NO: 7771 - protein, 9 aa, Severe acute respiratory syndrome coronavirus 2
FYSKWYIRV

SEQ ID NO: 7772 - protein, 10 aa, Severe acute respiratory syndrome coronavirus 2
FYSKWYIRVG

SEQ ID NO: 7773 - protein, 10 aa, Severe acute respiratory syndrome coronavirus 2
KWYIRVGARK

SEQ ID NO: 7774 - protein, 9 aa, Severe acute respiratory syndrome coronavirus 2
WYIRVGARK

SEQ ID NO: 7775 - protein, 10 aa, Severe acute respiratory syndrome coronavirus 2
RVGARKSAPL

SEQ ID NO: 7776 - protein, 9 aa, Severe acute respiratory syndrome coronavirus 2
GARKSAPLI

SEQ ID NO: 7777 - protein, 10 aa, Severe acute respiratory syndrome coronavirus 2
KSAPLIELCV

SEQ ID NO: 7778 - protein, 9 aa, Severe acute respiratory syndrome coronavirus 2
CVDEAGSKS

SEQ ID NO: 7779 - protein, 10 aa, Severe acute respiratory syndrome coronavirus 2
DEAGSKSPIQ

SEQ ID NO: 7780 - protein, 10 aa, Severe acute respiratory syndrome coronavirus 2
EAGSKSPIQY

SEQ ID NO: 7781 - protein, 9 aa, Severe acute respiratory syndrome coronavirus 2
IQYIDIGNY

SEQ ID NO: 7782 - protein, 10 aa, Severe acute respiratory syndrome coronavirus 2
IQYIDIGNYT

SEQ ID NO: 7783 - protein, 9 aa, Severe acute respiratory syndrome coronavirus 2
QYIDIGNYT

SEQ ID NO: 7784 - protein, 10 aa, Severe acute respiratory syndrome coronavirus 2
QYIDIGNYTV

SEQ ID NO: 7785 - protein, 9 aa, Severe acute respiratory syndrome coronavirus 2
YIDIGNYTV

SEQ ID NO: 7786 - protein, 10 aa, Severe acute respiratory syndrome coronavirus 2
YIDIGNYTVS

SEQ ID NO: 7787 - protein, 10 aa, Severe acute respiratory syndrome coronavirus 2
IDIGNYTVSC

SEQ ID NO: 7788 - protein, 9 aa, Severe acute respiratory syndrome coronavirus 2
IGNYTVSCL

SEQ ID NO: 7789 - protein, 9 aa, Severe acute respiratory syndrome coronavirus 2
NYTVSCLPF

SEQ ID NO: 7790 - protein, 10 aa, Severe acute respiratory syndrome coronavirus 2
NYTVSCLPFT

SEQ ID NO: 7791 - protein, 9 aa, Severe acute respiratory syndrome coronavirus 2
YTVSCLPFT

SEQ ID NO: 7792 - protein, 10 aa, Severe acute respiratory syndrome coronavirus 2
YTVSCLPFTI

SEQ ID NO: 7793 - protein, 9 aa, Severe acute respiratory syndrome coronavirus 2
FTINCQEPK

SEQ ID NO: 7794 - protein, 10 aa, Severe acute respiratory syndrome coronavirus 2
LGSLVVRCSF

SEQ ID NO: 7795 - protein, 10 aa, Severe acute respiratory syndrome coronavirus 2
GSLVVRCSFY

SEQ ID NO: 7796 - protein, 9 aa, Severe acute respiratory syndrome coronavirus 2
SLVVRCSFY

SEQ ID NO: 7797 - protein, 10 aa, Severe acute respiratory syndrome coronavirus 2
SLVVRCSFYE

SEQ ID NO: 7798 - protein, 9 aa, Severe acute respiratory syndrome coronavirus 2
CSFYEDFLE

SEQ ID NO: 7799 - protein, 10 aa, Severe acute respiratory syndrome coronavirus 2
CSFYEDFLEY

SEQ ID NO: 7800 - protein, 9 aa, Severe acute respiratory syndrome coronavirus 2
SFYEDFLEY

SEQ ID NO: 7801 - protein, 10 aa, Severe acute respiratory syndrome coronavirus 2
SFYEDFLEYH

SEQ ID NO: 7802 - protein, 10 aa, Severe acute respiratory syndrome coronavirus 2
FYEDFLEYHD

SEQ ID NO: 7803 - protein, 10 aa, Severe acute respiratory syndrome coronavirus 2
YEDFLEYHDV

SEQ ID NO: 7804 - protein, 9 aa, Severe acute respiratory syndrome coronavirus 2
FLEYHDVRV

SEQ ID NO: 7805 - protein, 10 aa, Severe acute respiratory syndrome coronavirus 2
FLEYHDVRVV

SEQ ID NO: 7806 - protein, 9 aa, Severe acute respiratory syndrome coronavirus 2
LEYHDVRVV

SEQ ID NO: 7807 - protein, 10 aa, Severe acute respiratory syndrome coronavirus 2
LEYHDVRVVL

SEQ ID NO: 7808 - protein, 9 aa, Severe acute respiratory syndrome coronavirus 2
EYHDVRVVL

SEQ ID NO: 7809 - protein, 10 aa, Severe acute respiratory syndrome coronavirus 2
YHDVRVVLDF

SEQ ID NO: 7810 - protein, 10 aa, Severe acute respiratory syndrome coronavirus 2
FVFLVLLPLV

SEQ ID NO: 7811 - protein, 10 aa, Severe acute respiratory syndrome coronavirus 2
FLVLLPLVSS

SEQ ID NO: 7812 - protein, 10 aa, Severe acute respiratory syndrome coronavirus 2
LLPLVSSQCV

SEQ ID NO: 7813 - protein, 9 aa, Severe acute respiratory syndrome coronavirus 2
LPLVSSQCV

SEQ ID NO: 7814 - protein, 9 aa, Severe acute respiratory syndrome coronavirus 2
LVSSQCVNL

SEQ ID NO: 7815 - protein, 10 aa, Severe acute respiratory syndrome coronavirus 2
SSQCVNLTTR

SEQ ID NO: 7816 - protein, 10 aa, Severe acute respiratory syndrome coronavirus 2
SQCVNLTTRT

SEQ ID NO: 7817 - protein, 10 aa, Severe acute respiratory syndrome coronavirus 2
TTRTQLPPAY

SEQ ID NO: 7818 - protein, 10 aa, Severe acute respiratory syndrome coronavirus 2
QLPPAYTNSF

SEQ ID NO: 7819 - protein, 9 aa, Severe acute respiratory syndrome coronavirus 2
LPPAYTNSF

SEQ ID NO: 7820 - protein, 9 aa, Severe acute respiratory syndrome coronavirus 2
AYTNSFTRG

SEQ ID NO: 7821 - protein, 10 aa, Severe acute respiratory syndrome coronavirus 2
AYTNSFTRGV

SEQ ID NO: 7822 - protein, 9 aa, Severe acute respiratory syndrome coronavirus 2
YTNSFTRGV

SEQ ID NO: 7823 - protein, 10 aa, Severe acute respiratory syndrome coronavirus 2
YTNSFTRGVY

SEQ ID NO: 7824 - protein, 9 aa, Severe acute respiratory syndrome coronavirus 2
TNSFTRGVY

SEQ ID NO: 7825 - protein, 10 aa, Severe acute respiratory syndrome coronavirus 2
TNSFTRGVYY

SEQ ID NO: 7826 - protein, 9 aa, Severe acute respiratory syndrome coronavirus 2
NSFTRGVYY

SEQ ID NO: 7827 - protein, 10 aa, Severe acute respiratory syndrome coronavirus 2
FTRGVYYPDK

SEQ ID NO: 7828 - protein, 10 aa, Severe acute respiratory syndrome coronavirus 2
GVYYPDKVFR

SEQ ID NO: 7829 - protein, 10 aa, Severe acute respiratory syndrome coronavirus 2
VYYPDKVFRS

SEQ ID NO: 7830 - protein, 9 aa, Severe acute respiratory syndrome coronavirus 2
YYPDKVFRS

SEQ ID NO: 7831 - protein, 10 aa, Severe acute respiratory syndrome coronavirus 2
YYPDKVFRSS

SEQ ID NO: 7832 - protein, 9 aa, Severe acute respiratory syndrome coronavirus 2
YPDKVFRSS

SEQ ID NO: 7833 - protein, 10 aa, Severe acute respiratory syndrome coronavirus 2
YPDKVFRSSV

SEQ ID NO: 7834 - protein, 10 aa, Severe acute respiratory syndrome coronavirus 2
VFRSSVLHST

SEQ ID NO: 7835 - protein, 9 aa, Severe acute respiratory syndrome coronavirus 2
SVLHSTQDL

SEQ ID NO: 7836 - protein, 10 aa, Severe acute respiratory syndrome coronavirus 2
SVLHSTQDLF

SEQ ID NO: 7837 - protein, 9 aa, Severe acute respiratory syndrome coronavirus 2
VLHSTQDLF

SEQ ID NO: 7838 - protein, 10 aa, Severe acute respiratory syndrome coronavirus 2
VLHSTQDLFL

SEQ ID NO: 7839 - protein, 10 aa, Severe acute respiratory syndrome coronavirus 2
STQDLFLPFF

SEQ ID NO: 7840 - protein, 9 aa, Severe acute respiratory syndrome coronavirus 2
TQDLFLPFF

SEQ ID NO: 7841 - protein, 10 aa, Severe acute respiratory syndrome coronavirus 2
TQDLFLPFFS

SEQ ID NO: 7842 - protein, 10 aa, Severe acute respiratory syndrome coronavirus 2
DLFLPFFSNV

SEQ ID NO: 7843 - protein, 9 aa, Severe acute respiratory syndrome coronavirus 2
LFLPFFSNV

SEQ ID NO: 7844 - protein, 10 aa, Severe acute respiratory syndrome coronavirus 2
LFLPFFSNVT

SEQ ID NO: 7845 - protein, 9 aa, Severe acute respiratory syndrome coronavirus 2
FLPFFSNVT

SEQ ID NO: 7846 - protein, 10 aa, Severe acute respiratory syndrome coronavirus 2
FLPFFSNVTW

SEQ ID NO: 7847 - protein, 9 aa, Severe acute respiratory syndrome coronavirus 2
LPFFSNVTW

SEQ ID NO: 7848 - protein, 10 aa, Severe acute respiratory syndrome coronavirus 2
LPFFSNVTWF

SEQ ID NO: 7849 - protein, 9 aa, Severe acute respiratory syndrome coronavirus 2
PFFSNVTWF

SEQ ID NO: 7850 - protein, 10 aa, Severe acute respiratory syndrome coronavirus 2
PFFSNVTWFH

SEQ ID NO: 7851 - protein, 9 aa, Severe acute respiratory syndrome coronavirus 2
FFSNVTWFH

SEQ ID NO: 7852 - protein, 10 aa, Severe acute respiratory syndrome coronavirus 2
FFSNVTWFHA

SEQ ID NO: 7853 - protein, 9 aa, Severe acute respiratory syndrome coronavirus 2
FSNVTWFHA

SEQ ID NO: 7854 - protein, 10 aa, Severe acute respiratory syndrome coronavirus 2
FSNVTWFHAI

SEQ ID NO: 7855 - protein, 9 aa, Severe acute respiratory syndrome coronavirus 2
VTWFHAIHV

SEQ ID NO: 7856 - protein, 10 aa, Severe acute respiratory syndrome coronavirus 2
TWFHAIHVSG

SEQ ID NO: 7857 - protein, 10 aa, Severe acute respiratory syndrome coronavirus 2
IHVSGTNGTK

SEQ ID NO: 7858 - protein, 9 aa, Severe acute respiratory syndrome coronavirus 2
HVSGTNGTK

SEQ ID NO: 7859 - protein, 10 aa, Severe acute respiratory syndrome coronavirus 2
HVSGTNGTKR

SEQ ID NO: 7860 - protein, 9 aa, Severe acute respiratory syndrome coronavirus 2
VSGTNGTKR

SEQ ID NO: 7861 - protein, 9 aa, Severe acute respiratory syndrome coronavirus 2
RFDNPVLPF

SEQ ID NO: 7862 - protein, 9 aa, Severe acute respiratory syndrome coronavirus 2
VLPFNDGVY

SEQ ID NO: 7863 - protein, 10 aa, Severe acute respiratory syndrome coronavirus 2
VLPFNDGVYF

SEQ ID NO: 7864 - protein, 9 aa, Severe acute respiratory syndrome coronavirus 2
LPFNDGVYF

SEQ ID NO: 7865 - protein, 10 aa, Severe acute respiratory syndrome coronavirus 2
LPFNDGVYFA

SEQ ID NO: 7866 - protein, 9 aa, Severe acute respiratory syndrome coronavirus 2
GVYFASTEK

SEQ ID NO: 7867 - protein, 9 aa, Severe acute respiratory syndrome coronavirus 2
VYFASTEKS

SEQ ID NO: 7868 - protein, 10 aa, Severe acute respiratory syndrome coronavirus 2
VYFASTEKSN

SEQ ID NO: 7869 - protein, 10 aa, Severe acute respiratory syndrome coronavirus 2
YFASTEKSNI

SEQ ID NO: 7870 - protein, 10 aa, Severe acute respiratory syndrome coronavirus 2
STEKSNIIRG

SEQ ID NO: 7871 - protein, 9 aa, Severe acute respiratory syndrome coronavirus 2
TEKSNIIRG

SEQ ID NO: 7872 - protein, 10 aa, Severe acute respiratory syndrome coronavirus 2
TEKSNIIRGW

SEQ ID NO: 7873 - protein, 9 aa, Severe acute respiratory syndrome coronavirus 2
EKSNIIRGW

SEQ ID NO: 7874 - protein, 9 aa, Severe acute respiratory syndrome coronavirus 2
KSNIIRGWI

SEQ ID NO: 7875 - protein, 10 aa, Severe acute respiratory syndrome coronavirus 2
KSNIIRGWIF

SEQ ID NO: 7876 - protein, 9 aa, Severe acute respiratory syndrome coronavirus 2
SNIIRGWIF

SEQ ID NO: 7877 - protein, 10 aa, Severe acute respiratory syndrome coronavirus 2
NIIRGWIFGT

SEQ ID NO: 7878 - protein, 10 aa, Severe acute respiratory syndrome coronavirus 2
IIRGWIFGTT

SEQ ID NO: 7879 - protein, 10 aa, Severe acute respiratory syndrome coronavirus 2
IRGWIFGTTL

SEQ ID NO: 7880 - protein, 9 aa, Severe acute respiratory syndrome coronavirus 2
RGWIFGTTL

SEQ ID NO: 7881 - protein, 10 aa, Severe acute respiratory syndrome coronavirus 2
WIFGTTLDSK

SEQ ID NO: 7882 - protein, 10 aa, Severe acute respiratory syndrome coronavirus 2
TTLDSKTQSL

SEQ ID NO: 7883 - protein, 9 aa, Severe acute respiratory syndrome coronavirus 2
TLDSKTQSL

SEQ ID NO: 7884 - protein, 10 aa, Severe acute respiratory syndrome coronavirus 2
TLDSKTQSLL

SEQ ID NO: 7885 - protein, 10 aa, Severe acute respiratory syndrome coronavirus 2
LDSKTQSLLI

SEQ ID NO: 7886 - protein, 9 aa, Severe acute respiratory syndrome coronavirus 2
SLLIVNNAT

SEQ ID NO: 7887 - protein, 10 aa, Severe acute respiratory syndrome coronavirus 2
LLIVNNATNV

SEQ ID NO: 7888 - protein, 10 aa, Severe acute respiratory syndrome coronavirus 2
LIVNNATNVV

SEQ ID NO: 7889 - protein, 9 aa, Severe acute respiratory syndrome coronavirus 2
IVNNATNVV

SEQ ID NO: 7890 - protein, 10 aa, Severe acute respiratory syndrome coronavirus 2
VVIKVCEFQF

SEQ ID NO: 7891 - protein, 9 aa, Severe acute respiratory syndrome coronavirus 2
VIKVCEFQF

SEQ ID NO: 7892 - protein, 9 aa, Severe acute respiratory syndrome coronavirus 2
KVCEFQFCN

SEQ ID NO: 7893 - protein, 10 aa, Severe acute respiratory syndrome coronavirus 2
KVCEFQFCND

SEQ ID NO: 7894 - protein, 10 aa, Severe acute respiratory syndrome coronavirus 2
CEFQFCNDPF

SEQ ID NO: 7895 - protein, 9 aa, Severe acute respiratory syndrome coronavirus 2
EFQFCNDPF

SEQ ID NO: 7896 - protein, 10 aa, Severe acute respiratory syndrome coronavirus 2
EFQFCNDPFL

SEQ ID NO: 7897 - protein, 9 aa, Severe acute respiratory syndrome coronavirus 2
FQFCNDPFL

SEQ ID NO: 7898 - protein, 10 aa, Severe acute respiratory syndrome coronavirus 2
FQFCNDPFLG

SEQ ID NO: 7899 - protein, 9 aa, Severe acute respiratory syndrome coronavirus 2
FCNDPFLGV

SEQ ID NO: 7900 - protein, 10 aa, Severe acute respiratory syndrome coronavirus 2
FCNDPFLGVY

SEQ ID NO: 7901 - protein, 9 aa, Severe acute respiratory syndrome coronavirus 2
CNDPFLGVY

SEQ ID NO: 7902 - protein, 10 aa, Severe acute respiratory syndrome coronavirus 2
CNDPFLGVYY

SEQ ID NO: 7903 - protein, 9 aa, Severe acute respiratory syndrome coronavirus 2
NDPFLGVYY

SEQ ID NO: 7904 - protein, 9 aa, Severe acute respiratory syndrome coronavirus 2
PFLGVYYHK

SEQ ID NO: 7905 - protein, 9 aa, Severe acute respiratory syndrome coronavirus 2
GVYYHKNNK

SEQ ID NO: 7906 - protein, 10 aa, Severe acute respiratory syndrome coronavirus 2
VYYHKNNKSW

SEQ ID NO: 7907 - protein, 9 aa, Severe acute respiratory syndrome coronavirus 2
YYHKNNKSW

SEQ ID NO: 7908 - protein, 10 aa, Severe acute respiratory syndrome coronavirus 2
YYHKNNKSWM

SEQ ID NO: 7909 - protein, 10 aa, Severe acute respiratory syndrome coronavirus 2
NNKSWMESEF

SEQ ID NO: 7910 - protein, 9 aa, Severe acute respiratory syndrome coronavirus 2
KSWMESEFR

SEQ ID NO: 7911 - protein, 9 aa, Severe acute respiratory syndrome coronavirus 2
SWMESEFRV

SEQ ID NO: 7912 - protein, 10 aa, Severe acute respiratory syndrome coronavirus 2
SWMESEFRVY

SEQ ID NO: 7913 - protein, 9 aa, Severe acute respiratory syndrome coronavirus 2
WMESEFRVY

SEQ ID NO: 7914 - protein, 10 aa, Severe acute respiratory syndrome coronavirus 2
WMESEFRVYS

SEQ ID NO: 7915 - protein, 9 aa, Severe acute respiratory syndrome coronavirus 2
MESEFRVYS

SEQ ID NO: 7916 - protein, 10 aa, Severe acute respiratory syndrome coronavirus 2
MESEFRVYSS

SEQ ID NO: 7917 - protein, 10 aa, Severe acute respiratory syndrome coronavirus 2
ESEFRVYSSA

SEQ ID NO: 7918 - protein, 9 aa, Severe acute respiratory syndrome coronavirus 2
SEFRVYSSA

SEQ ID NO: 7919 - protein, 10 aa, Severe acute respiratory syndrome coronavirus 2
SEFRVYSSAN

SEQ ID NO: 7920 - protein, 9 aa, Severe acute respiratory syndrome coronavirus 2
RVYSSANNC

SEQ ID NO: 7921 - protein, 9 aa, Severe acute respiratory syndrome coronavirus 2
VYSSANNCT

SEQ ID NO: 7922 - protein, 10 aa, Severe acute respiratory syndrome coronavirus 2
VYSSANNCTF

SEQ ID NO: 7923 - protein, 9 aa, Severe acute respiratory syndrome coronavirus 2
YSSANNCTF

SEQ ID NO: 7924 - protein, 10 aa, Severe acute respiratory syndrome coronavirus 2
YSSANNCTFE

SEQ ID NO: 7925 - protein, 9 aa, Severe acute respiratory syndrome coronavirus 2
SSANNCTFE

SEQ ID NO: 7926 - protein, 10 aa, Severe acute respiratory syndrome coronavirus 2
SSANNCTFEY

SEQ ID NO: 7927 - protein, 9 aa, Severe acute respiratory syndrome coronavirus 2
SANNCTFEY

SEQ ID NO: 7928 - protein, 10 aa, Severe acute respiratory syndrome coronavirus 2
SANNCTFEYV

SEQ ID NO: 7929 - protein, 9 aa, Severe acute respiratory syndrome coronavirus 2
CTFEYVSQP

SEQ ID NO: 7930 - protein, 10 aa, Severe acute respiratory syndrome coronavirus 2
CTFEYVSQPF

SEQ ID NO: 7931 - protein, 9 aa, Severe acute respiratory syndrome coronavirus 2
TFEYVSQPF

SEQ ID NO: 7932 - protein, 9 aa, Severe acute respiratory syndrome coronavirus 2
FEYVSQPFL

SEQ ID NO: 7933 - protein, 10 aa, Severe acute respiratory syndrome coronavirus 2
FEYVSQPFLM

SEQ ID NO: 7934 - protein, 10 aa, Severe acute respiratory syndrome coronavirus 2
YVSQPFLMDL

SEQ ID NO: 7935 - protein, 9 aa, Severe acute respiratory syndrome coronavirus 2
VSQPFLMDL

SEQ ID NO: 7936 - protein, 10 aa, Severe acute respiratory syndrome coronavirus 2
VSQPFLMDLE

SEQ ID NO: 7937 - protein, 10 aa, Severe acute respiratory syndrome coronavirus 2
LMDLEGKQGN

SEQ ID NO: 7938 - protein, 10 aa, Severe acute respiratory syndrome coronavirus 2
DLEGKQGNFK

SEQ ID NO: 7939 - protein, 9 aa, Severe acute respiratory syndrome coronavirus 2
KQGNFKNLR

SEQ ID NO: 7940 - protein, 10 aa, Severe acute respiratory syndrome coronavirus 2
QGNFKNLREF

SEQ ID NO: 7941 - protein, 10 aa, Severe acute respiratory syndrome coronavirus 2
NFKNLREFVF

SEQ ID NO: 7942 - protein, 10 aa, Severe acute respiratory syndrome coronavirus 2
FKNLREFVFK

SEQ ID NO: 7943 - protein, 9 aa, Severe acute respiratory syndrome coronavirus 2
KNLREFVFK

SEQ ID NO: 7944 - protein, 10 aa, Severe acute respiratory syndrome coronavirus 2
REFVFKNIDG

SEQ ID NO: 7945 - protein, 9 aa, Severe acute respiratory syndrome coronavirus 2
FVFKNIDGY

SEQ ID NO: 7946 - protein, 10 aa, Severe acute respiratory syndrome coronavirus 2
FVFKNIDGYF

SEQ ID NO: 7947 - protein, 9 aa, Severe acute respiratory syndrome coronavirus 2
VFKNIDGYF

SEQ ID NO: 7948 - protein, 10 aa, Severe acute respiratory syndrome coronavirus 2
VFKNIDGYFK

SEQ ID NO: 7949 - protein, 9 aa, Severe acute respiratory syndrome coronavirus 2
KNIDGYFKI

SEQ ID NO: 7950 - protein, 9 aa, Severe acute respiratory syndrome coronavirus 2
NIDGYFKIY

SEQ ID NO: 7951 - protein, 10 aa, Severe acute respiratory syndrome coronavirus 2
NIDGYFKIYS

SEQ ID NO: 7952 - protein, 10 aa, Severe acute respiratory syndrome coronavirus 2
IDGYFKIYSK

SEQ ID NO: 7953 - protein, 10 aa, Severe acute respiratory syndrome coronavirus 2
GYFKIYSKHT

SEQ ID NO: 7954 - protein, 10 aa, Severe acute respiratory syndrome coronavirus 2
YFKIYSKHTP

SEQ ID NO: 7955 - protein, 10 aa, Severe acute respiratory syndrome coronavirus 2
FKIYSKHTPI

SEQ ID NO: 7956 - protein, 9 aa, Severe acute respiratory syndrome coronavirus 2
KIYSKHTPI

SEQ ID NO: 7957 - protein, 9 aa, Severe acute respiratory syndrome coronavirus 2
IYSKHTPIN

SEQ ID NO: 7958 - protein, 10 aa, Severe acute respiratory syndrome coronavirus 2
IYSKHTPINL

SEQ ID NO: 7959 - protein, 10 aa, Severe acute respiratory syndrome coronavirus 2
YSKHTPINLV

SEQ ID NO: 7960 - protein, 9 aa, Severe acute respiratory syndrome coronavirus 2
TPINLVRDL

SEQ ID NO: 7961 - protein, 10 aa, Severe acute respiratory syndrome coronavirus 2
TPINLVRDLP

SEQ ID NO: 7962 - protein, 9 aa, Severe acute respiratory syndrome coronavirus 2
LVRDLPQGF

SEQ ID NO: 7963 - protein, 9 aa, Severe acute respiratory syndrome coronavirus 2
LPQGFSALE

SEQ ID NO: 7964 - protein, 9 aa, Severe acute respiratory syndrome coronavirus 2
FSALEPLVD

SEQ ID NO: 7965 - protein, 10 aa, Severe acute respiratory syndrome coronavirus 2
ALEPLVDLPI

SEQ ID NO: 7966 - protein, 10 aa, Severe acute respiratory syndrome coronavirus 2
LVDLPIGINI

SEQ ID NO: 7967 - protein, 9 aa, Severe acute respiratory syndrome coronavirus 2
VDLPIGINI

SEQ ID NO: 7968 - protein, 9 aa, Severe acute respiratory syndrome coronavirus 2
LPIGINITR

SEQ ID NO: 7969 - protein, 10 aa, Severe acute respiratory syndrome coronavirus 2
LPIGINITRF

SEQ ID NO: 7970 - protein, 10 aa, Severe acute respiratory syndrome coronavirus 2
GINITRFQTL

SEQ ID NO: 7971 - protein, 9 aa, Severe acute respiratory syndrome coronavirus 2
NITRFQTLL

SEQ ID NO: 7972 - protein, 10 aa, Severe acute respiratory syndrome coronavirus 2
ITRFQTLLAL

SEQ ID NO: 7973 - protein, 10 aa, Severe acute respiratory syndrome coronavirus 2
RFQTLLALHR

SEQ ID NO: 7974 - protein, 10 aa, Severe acute respiratory syndrome coronavirus 2
QTLLALHRSY

SEQ ID NO: 7975 - protein, 9 aa, Severe acute respiratory syndrome coronavirus 2
TLLALHRSY

SEQ ID NO: 7976 - protein, 10 aa, Severe acute respiratory syndrome coronavirus 2
TLLALHRSYL

SEQ ID NO: 7977 - protein, 9 aa, Severe acute respiratory syndrome coronavirus 2
LLALHRSYL

SEQ ID NO: 7978 - protein, 10 aa, Severe acute respiratory syndrome coronavirus 2
LLALHRSYLT

SEQ ID NO: 7979 - protein, 10 aa, Severe acute respiratory syndrome coronavirus 2
YLTPGDSSSG

SEQ ID NO: 7980 - protein, 9 aa, Severe acute respiratory syndrome coronavirus 2
SSSGWTAGA

SEQ ID NO: 7981 - protein, 10 aa, Severe acute respiratory syndrome coronavirus 2
SSGWTAGAAA

SEQ ID NO: 7982 - protein, 10 aa, Severe acute respiratory syndrome coronavirus 2
GWTAGAAAYY

SEQ ID NO: 7983 - protein, 9 aa, Severe acute respiratory syndrome coronavirus 2
WTAGAAAYY

SEQ ID NO: 7984 - protein, 10 aa, Severe acute respiratory syndrome coronavirus 2
WTAGAAAYYV

SEQ ID NO: 7985 - protein, 10 aa, Severe acute respiratory syndrome coronavirus 2
AGAAAYYVGY

SEQ ID NO: 7986 - protein, 9 aa, Severe acute respiratory syndrome coronavirus 2
GAAAYYVGY

SEQ ID NO: 7987 - protein, 10 aa, Severe acute respiratory syndrome coronavirus 2
GAAAYYVGYL

SEQ ID NO: 7988 - protein, 10 aa, Severe acute respiratory syndrome coronavirus 2
AYYVGYLQPR

SEQ ID NO: 7989 - protein, 9 aa, Severe acute respiratory syndrome coronavirus 2
YYVGYLQPR

SEQ ID NO: 7990 - protein, 10 aa, Severe acute respiratory syndrome coronavirus 2
YYVGYLQPRT

SEQ ID NO: 7991 - protein, 10 aa, Severe acute respiratory syndrome coronavirus 2
YVGYLQPRTF

SEQ ID NO: 7992 - protein, 9 aa, Severe acute respiratory syndrome coronavirus 2
GYLQPRTFL

SEQ ID NO: 7993 - protein, 10 aa, Severe acute respiratory syndrome coronavirus 2
GYLQPRTFLL

SEQ ID NO: 7994 - protein, 9 aa, Severe acute respiratory syndrome coronavirus 2
YLQPRTFLL

SEQ ID NO: 7995 - protein, 10 aa, Severe acute respiratory syndrome coronavirus 2
YLQPRTFLLK

SEQ ID NO: 7996 - protein, 9 aa, Severe acute respiratory syndrome coronavirus 2
LQPRTFLLK

SEQ ID NO: 7997 - protein, 10 aa, Severe acute respiratory syndrome coronavirus 2
LQPRTFLLKY

SEQ ID NO: 7998 - protein, 10 aa, Severe acute respiratory syndrome coronavirus 2
FLLKYNENGT

SEQ ID NO: 7999 - protein, 9 aa, Severe acute respiratory syndrome coronavirus 2
NENGTITDA

SEQ ID NO: 8000 - protein, 10 aa, Severe acute respiratory syndrome coronavirus 2
NENGTITDAV

SEQ ID NO: 8001 - protein, 10 aa, Severe acute respiratory syndrome coronavirus 2
TITDAVDCAL

SEQ ID NO: 8002 - protein, 9 aa, Severe acute respiratory syndrome coronavirus 2
ITDAVDCAL

SEQ ID NO: 8003 - protein, 10 aa, Severe acute respiratory syndrome coronavirus 2
ITDAVDCALD

SEQ ID NO: 8004 - protein, 9 aa, Severe acute respiratory syndrome coronavirus 2
AVDCALDPL

SEQ ID NO: 8005 - protein, 10 aa, Severe acute respiratory syndrome coronavirus 2
CALDPLSETK

SEQ ID NO: 8006 - protein, 9 aa, Severe acute respiratory syndrome coronavirus 2
ALDPLSETK

SEQ ID NO: 8007 - protein, 10 aa, Severe acute respiratory syndrome coronavirus 2
ALDPLSETKC

SEQ ID NO: 8008 - protein, 10 aa, Severe acute respiratory syndrome coronavirus 2
DPLSETKCTL

SEQ ID NO: 8009 - protein, 10 aa, Severe acute respiratory syndrome coronavirus 2
PLSETKCTLK

SEQ ID NO: 8010 - protein, 9 aa, Severe acute respiratory syndrome coronavirus 2
LSETKCTLK

SEQ ID NO: 8011 - protein, 10 aa, Severe acute respiratory syndrome coronavirus 2
LSETKCTLKS

SEQ ID NO: 8012 - protein, 9 aa, Severe acute respiratory syndrome coronavirus 2
SETKCTLKS

SEQ ID NO: 8013 - protein, 10 aa, Severe acute respiratory syndrome coronavirus 2
SETKCTLKSF

SEQ ID NO: 8014 - protein, 10 aa, Severe acute respiratory syndrome coronavirus 2
TKCTLKSFTV

SEQ ID NO: 8015 - protein, 10 aa, Severe acute respiratory syndrome coronavirus 2
CTLKSFTVEK

SEQ ID NO: 8016 - protein, 9 aa, Severe acute respiratory syndrome coronavirus 2
TLKSFTVEK

SEQ ID NO: 8017 - protein, 10 aa, Severe acute respiratory syndrome coronavirus 2
KSFTVEKGIY

SEQ ID NO: 8018 - protein, 10 aa, Severe acute respiratory syndrome coronavirus 2
TVEKGIYQTS

SEQ ID NO: 8019 - protein, 10 aa, Severe acute respiratory syndrome coronavirus 2
EKGIYQTSNF

SEQ ID NO: 8020 - protein, 9 aa, Severe acute respiratory syndrome coronavirus 2
KGIYQTSNF

SEQ ID NO: 8021 - protein, 9 aa, Severe acute respiratory syndrome coronavirus 2
GIYQTSNFR

SEQ ID NO: 8022 - protein, 10 aa, Severe acute respiratory syndrome coronavirus 2
GIYQTSNFRV

SEQ ID NO: 8023 - protein, 9 aa, Severe acute respiratory syndrome coronavirus 2
IYQTSNFRV

SEQ ID NO: 8024 - protein, 10 aa, Severe acute respiratory syndrome coronavirus 2
IYQTSNFRVQ

SEQ ID NO: 8025 - protein, 9 aa, Severe acute respiratory syndrome coronavirus 2
QPTESIVRF

SEQ ID NO: 8026 - protein, 10 aa, Severe acute respiratory syndrome coronavirus 2
TESIVRFPNI

SEQ ID NO: 8027 - protein, 10 aa, Severe acute respiratory syndrome coronavirus 2
IVRFPNITNL

SEQ ID NO: 8028 - protein, 9 aa, Severe acute respiratory syndrome coronavirus 2
RFPNITNLC

SEQ ID NO: 8029 - protein, 10 aa, Severe acute respiratory syndrome coronavirus 2
RFPNITNLCP

SEQ ID NO: 8030 - protein, 9 aa, Severe acute respiratory syndrome coronavirus 2
FPNITNLCP

SEQ ID NO: 8031 - protein, 10 aa, Severe acute respiratory syndrome coronavirus 2
FPNITNLCPF

SEQ ID NO: 8032 - protein, 9 aa, Severe acute respiratory syndrome coronavirus 2
PNITNLCPF

SEQ ID NO: 8033 - protein, 9 aa, Severe acute respiratory syndrome coronavirus 2
ITNLCPFGE

SEQ ID NO: 8034 - protein, 10 aa, Severe acute respiratory syndrome coronavirus 2
TNLCPFGEVF

SEQ ID NO: 8035 - protein, 9 aa, Severe acute respiratory syndrome coronavirus 2
GEVFNATRF

SEQ ID NO: 8036 - protein, 10 aa, Severe acute respiratory syndrome coronavirus 2
GEVFNATRFA

SEQ ID NO: 8037 - protein, 10 aa, Severe acute respiratory syndrome coronavirus 2
VFNATRFASV

SEQ ID NO: 8038 - protein, 9 aa, Severe acute respiratory syndrome coronavirus 2
FNATRFASV

SEQ ID NO: 8039 - protein, 9 aa, Severe acute respiratory syndrome coronavirus 2
NATRFASVY

SEQ ID NO: 8040 - protein, 9 aa, Severe acute respiratory syndrome coronavirus 2
TRFASVYAW

SEQ ID NO: 8041 - protein, 9 aa, Severe acute respiratory syndrome coronavirus 2
RFASVYAWN

SEQ ID NO: 8042 - protein, 9 aa, Severe acute respiratory syndrome coronavirus 2
ASVYAWNRK

SEQ ID NO: 8043 - protein, 10 aa, Severe acute respiratory syndrome coronavirus 2
ASVYAWNRKR

SEQ ID NO: 8044 - protein, 9 aa, Severe acute respiratory syndrome coronavirus 2
SVYAWNRKR

SEQ ID NO: 8045 - protein, 9 aa, Severe acute respiratory syndrome coronavirus 2
VYAWNRKRI

SEQ ID NO: 8046 - protein, 10 aa, Severe acute respiratory syndrome coronavirus 2
VYAWNRKRIS

SEQ ID NO: 8047 - protein, 10 aa, Severe acute respiratory syndrome coronavirus 2
KRISNCVADY

SEQ ID NO: 8048 - protein, 9 aa, Severe acute respiratory syndrome coronavirus 2
RISNCVADY

SEQ ID NO: 8049 - protein, 10 aa, Severe acute respiratory syndrome coronavirus 2
ISNCVADYSV

SEQ ID NO: 8050 - protein, 10 aa, Severe acute respiratory syndrome coronavirus 2
NCVADYSVLY

SEQ ID NO: 8051 - protein, 9 aa, Severe acute respiratory syndrome coronavirus 2
CVADYSVLY

SEQ ID NO: 8052 - protein, 10 aa, Severe acute respiratory syndrome coronavirus 2
VADYSVLYNS

SEQ ID NO: 8053 - protein, 10 aa, Severe acute respiratory syndrome coronavirus 2
YSVLYNSASF

SEQ ID NO: 8054 - protein, 9 aa, Severe acute respiratory syndrome coronavirus 2
SVLYNSASF

SEQ ID NO: 8055 - protein, 10 aa, Severe acute respiratory syndrome coronavirus 2
SVLYNSASFS

SEQ ID NO: 8056 - protein, 9 aa, Severe acute respiratory syndrome coronavirus 2
VLYNSASFS

SEQ ID NO: 8057 - protein, 10 aa, Severe acute respiratory syndrome coronavirus 2
VLYNSASFST

SEQ ID NO: 8058 - protein, 9 aa, Severe acute respiratory syndrome coronavirus 2
LYNSASFST

SEQ ID NO: 8059 - protein, 10 aa, Severe acute respiratory syndrome coronavirus 2
LYNSASFSTF

SEQ ID NO: 8060 - protein, 10 aa, Severe acute respiratory syndrome coronavirus 2
YNSASFSTFK

SEQ ID NO: 8061 - protein, 9 aa, Severe acute respiratory syndrome coronavirus 2
NSASFSTFK

SEQ ID NO: 8062 - protein, 10 aa, Severe acute respiratory syndrome coronavirus 2
NSASFSTFKC

SEQ ID NO: 8063 - protein, 10 aa, Severe acute respiratory syndrome coronavirus 2
SASFSTFKCY

SEQ ID NO: 8064 - protein, 9 aa, Severe acute respiratory syndrome coronavirus 2
ASFSTFKCY

SEQ ID NO: 8065 - protein, 10 aa, Severe acute respiratory syndrome coronavirus 2
ASFSTFKCYG

SEQ ID NO: 8066 - protein, 10 aa, Severe acute respiratory syndrome coronavirus 2
SFSTFKCYGV

SEQ ID NO: 8067 - protein, 9 aa, Severe acute respiratory syndrome coronavirus 2
FSTFKCYGV

SEQ ID NO: 8068 - protein, 10 aa, Severe acute respiratory syndrome coronavirus 2
STFKCYGVSP

SEQ ID NO: 8069 - protein, 10 aa, Severe acute respiratory syndrome coronavirus 2
FKCYGVSPTK

SEQ ID NO: 8070 - protein, 9 aa, Severe acute respiratory syndrome coronavirus 2
KCYGVSPTK

SEQ ID NO: 8071 - protein, 10 aa, Severe acute respiratory syndrome coronavirus 2
KCYGVSPTKL

SEQ ID NO: 8072 - protein, 9 aa, Severe acute respiratory syndrome coronavirus 2
CYGVSPTKL

SEQ ID NO: 8073 - protein, 10 aa, Severe acute respiratory syndrome coronavirus 2
SPTKLNDLCF

SEQ ID NO: 8074 - protein, 9 aa, Severe acute respiratory syndrome coronavirus 2
PTKLNDLCF

SEQ ID NO: 8075 - protein, 10 aa, Severe acute respiratory syndrome coronavirus 2
KLNDLCFTNV

SEQ ID NO: 8076 - protein, 10 aa, Severe acute respiratory syndrome coronavirus 2
LNDLCFTNVY

SEQ ID NO: 8077 - protein, 9 aa, Severe acute respiratory syndrome coronavirus 2
NDLCFTNVY

SEQ ID NO: 8078 - protein, 10 aa, Severe acute respiratory syndrome coronavirus 2
NDLCFTNVYA

SEQ ID NO: 8079 - protein, 10 aa, Severe acute respiratory syndrome coronavirus 2
CFTNVYADSF

SEQ ID NO: 8080 - protein, 9 aa, Severe acute respiratory syndrome coronavirus 2
FTNVYADSF

SEQ ID NO: 8081 - protein, 10 aa, Severe acute respiratory syndrome coronavirus 2
FTNVYADSFV

SEQ ID NO: 8082 - protein, 9 aa, Severe acute respiratory syndrome coronavirus 2
NVYADSFVI

SEQ ID NO: 8083 - protein, 9 aa, Severe acute respiratory syndrome coronavirus 2
VYADSFVIR

SEQ ID NO: 8084 - protein, 10 aa, Severe acute respiratory syndrome coronavirus 2
VYADSFVIRG

SEQ ID NO: 8085 - protein, 10 aa, Severe acute respiratory syndrome coronavirus 2
YADSFVIRGD

SEQ ID NO: 8086 - protein, 10 aa, Severe acute respiratory syndrome coronavirus 2
RQIAPGQTGK

SEQ ID NO: 8087 - protein, 9 aa, Severe acute respiratory syndrome coronavirus 2
QIAPGQTGK

SEQ ID NO: 8088 - protein, 9 aa, Severe acute respiratory syndrome coronavirus 2
APGQTGKIA

SEQ ID NO: 8089 - protein, 10 aa, Severe acute respiratory syndrome coronavirus 2
APGQTGKIAD

SEQ ID NO: 8090 - protein, 9 aa, Severe acute respiratory syndrome coronavirus 2
GQTGKIADY

SEQ ID NO: 8091 - protein, 10 aa, Severe acute respiratory syndrome coronavirus 2
QTGKIADYNY

SEQ ID NO: 8092 - protein, 9 aa, Severe acute respiratory syndrome coronavirus 2
KIADYNYKL

SEQ ID NO: 8093 - protein, 10 aa, Severe acute respiratory syndrome coronavirus 2
DYNYKLPDDF

SEQ ID NO: 8094 - protein, 10 aa, Severe acute respiratory syndrome coronavirus 2
NYKLPDDFTG

SEQ ID NO: 8095 - protein, 9 aa, Severe acute respiratory syndrome coronavirus 2
KLPDDFTGC

SEQ ID NO: 8096 - protein, 10 aa, Severe acute respiratory syndrome coronavirus 2
KLPDDFTGCV

SEQ ID NO: 8097 - protein, 9 aa, Severe acute respiratory syndrome coronavirus 2
LPDDFTGCV

SEQ ID NO: 8098 - protein, 10 aa, Severe acute respiratory syndrome coronavirus 2
LPDDFTGCVI

SEQ ID NO: 8099 - protein, 9 aa, Severe acute respiratory syndrome coronavirus 2
DFTGCVIAW

SEQ ID NO: 8100 - protein, 9 aa, Severe acute respiratory syndrome coronavirus 2
VIAWNSNNL

SEQ ID NO: 8101 - protein, 10 aa, Severe acute respiratory syndrome coronavirus 2
AWNSNNLDSK

SEQ ID NO: 8102 - protein, 9 aa, Severe acute respiratory syndrome coronavirus 2
NSNNLDSKV

SEQ ID NO: 8103 - protein, 10 aa, Severe acute respiratory syndrome coronavirus 2
NLDSKVGGNY

SEQ ID NO: 8104 - protein, 9 aa, Severe acute respiratory syndrome coronavirus 2
LDSKVGGNY

SEQ ID NO: 8105 - protein, 10 aa, Severe acute respiratory syndrome coronavirus 2
DSKVGGNYNY

SEQ ID NO: 8106 - protein, 9 aa, Severe acute respiratory syndrome coronavirus 2
KVGGNYNYL

SEQ ID NO: 8107 - protein, 10 aa, Severe acute respiratory syndrome coronavirus 2
KVGGNYNYLY

SEQ ID NO: 8108 - protein, 9 aa, Severe acute respiratory syndrome coronavirus 2
VGGNYNYLY

SEQ ID NO: 8109 - protein, 10 aa, Severe acute respiratory syndrome coronavirus 2
GGNYNYLYRL

SEQ ID NO: 8110 - protein, 9 aa, Severe acute respiratory syndrome coronavirus 2
GNYNYLYRL

SEQ ID NO: 8111 - protein, 10 aa, Severe acute respiratory syndrome coronavirus 2
GNYNYLYRLF

SEQ ID NO: 8112 - protein, 9 aa, Severe acute respiratory syndrome coronavirus 2
NYNYLYRLF

SEQ ID NO: 8113 - protein, 10 aa, Severe acute respiratory syndrome coronavirus 2
NYNYLYRLFR

SEQ ID NO: 8114 - protein, 10 aa, Severe acute respiratory syndrome coronavirus 2
YNYLYRLFRK

SEQ ID NO: 8115 - protein, 9 aa, Severe acute respiratory syndrome coronavirus 2
NYLYRLFRK

SEQ ID NO: 8116 - protein, 10 aa, Severe acute respiratory syndrome coronavirus 2
LYRLFRKSNL

SEQ ID NO: 8117 - protein, 9 aa, Severe acute respiratory syndrome coronavirus 2
RLFRKSNLK

SEQ ID NO: 8118 - protein, 10 aa, Severe acute respiratory syndrome coronavirus 2
RLFRKSNLKP

SEQ ID NO: 8119 - protein, 10 aa, Severe acute respiratory syndrome coronavirus 2
LFRKSNLKPF

SEQ ID NO: 8120 - protein, 9 aa, Severe acute respiratory syndrome coronavirus 2
KSNLKPFER

SEQ ID NO: 8121 - protein, 9 aa, Severe acute respiratory syndrome coronavirus 2
KPFERDIST

SEQ ID NO: 8122 - protein, 9 aa, Severe acute respiratory syndrome coronavirus 2
FERDISTEI

SEQ ID NO: 8123 - protein, 10 aa, Severe acute respiratory syndrome coronavirus 2
FERDISTEIY

SEQ ID NO: 8124 - protein, 9 aa, Severe acute respiratory syndrome coronavirus 2
ERDISTEIY

SEQ ID NO: 8125 - protein, 10 aa, Severe acute respiratory syndrome coronavirus 2
STEIYQAGST

SEQ ID NO: 8126 - protein, 10 aa, Severe acute respiratory syndrome coronavirus 2
TEIYQAGSTP

SEQ ID NO: 8127 - protein, 10 aa, Severe acute respiratory syndrome coronavirus 2
IYQAGSTPCN

SEQ ID NO: 8128 - protein, 9 aa, Severe acute respiratory syndrome coronavirus 2
NGVEGFNCY

SEQ ID NO: 8129 - protein, 10 aa, Severe acute respiratory syndrome coronavirus 2
NGVEGFNCYF

SEQ ID NO: 8130 - protein, 9 aa, Severe acute respiratory syndrome coronavirus 2
GVEGFNCYF

SEQ ID NO: 8131 - protein, 10 aa, Severe acute respiratory syndrome coronavirus 2
VEGFNCYFPL

SEQ ID NO: 8132 - protein, 9 aa, Severe acute respiratory syndrome coronavirus 2
EGFNCYFPL

SEQ ID NO: 8133 - protein, 10 aa, Severe acute respiratory syndrome coronavirus 2
GFNCYFPLQS

SEQ ID NO: 8134 - protein, 10 aa, Severe acute respiratory syndrome coronavirus 2
FNCYFPLQSY

SEQ ID NO: 8135 - protein, 9 aa, Severe acute respiratory syndrome coronavirus 2
NCYFPLQSY

SEQ ID NO: 8136 - protein, 9 aa, Severe acute respiratory syndrome coronavirus 2
CYFPLQSYG

SEQ ID NO: 8137 - protein, 10 aa, Severe acute respiratory syndrome coronavirus 2
CYFPLQSYGF

SEQ ID NO: 8138 - protein, 9 aa, Severe acute respiratory syndrome coronavirus 2
YFPLQSYGF

SEQ ID NO: 8139 - protein, 10 aa, Severe acute respiratory syndrome coronavirus 2
FPLQSYGFQP

SEQ ID NO: 8140 - protein, 10 aa, Severe acute respiratory syndrome coronavirus 2
GFQPTNGVGY

SEQ ID NO: 8141 - protein, 9 aa, Severe acute respiratory syndrome coronavirus 2
FQPTNGVGY

SEQ ID NO: 8142 - protein, 10 aa, Severe acute respiratory syndrome coronavirus 2
QPTNGVGYQP

SEQ ID NO: 8143 - protein, 10 aa, Severe acute respiratory syndrome coronavirus 2
GYQPYRVVVL

SEQ ID NO: 8144 - protein, 9 aa, Severe acute respiratory syndrome coronavirus 2
YQPYRVVVL

SEQ ID NO: 8145 - protein, 10 aa, Severe acute respiratory syndrome coronavirus 2
QPYRVVVLSF

SEQ ID NO: 8146 - protein, 10 aa, Severe acute respiratory syndrome coronavirus 2
PYRVVVLSFE

SEQ ID NO: 8147 - protein, 9 aa, Severe acute respiratory syndrome coronavirus 2
RVVVLSFEL

SEQ ID NO: 8148 - protein, 10 aa, Severe acute respiratory syndrome coronavirus 2
VVLSFELLHA

SEQ ID NO: 8149 - protein, 9 aa, Severe acute respiratory syndrome coronavirus 2
VLSFELLHA

SEQ ID NO: 8150 - protein, 9 aa, Severe acute respiratory syndrome coronavirus 2
FELLHAPAT

SEQ ID NO: 8151 - protein, 10 aa, Severe acute respiratory syndrome coronavirus 2
FELLHAPATV

SEQ ID NO: 8152 - protein, 9 aa, Severe acute respiratory syndrome coronavirus 2
ELLHAPATV

SEQ ID NO: 8153 - protein, 9 aa, Severe acute respiratory syndrome coronavirus 2
APATVCGPK

SEQ ID NO: 8154 - protein, 10 aa, Severe acute respiratory syndrome coronavirus 2
APATVCGPKK

SEQ ID NO: 8155 - protein, 10 aa, Severe acute respiratory syndrome coronavirus 2
GPKKSTNLVK

SEQ ID NO: 8156 - protein, 9 aa, Severe acute respiratory syndrome coronavirus 2
KSTNLVKNK

SEQ ID NO: 8157 - protein, 10 aa, Severe acute respiratory syndrome coronavirus 2
VKNKCVNFNF

SEQ ID NO: 8158 - protein, 9 aa, Severe acute respiratory syndrome coronavirus 2
KNKCVNFNF

SEQ ID NO: 8159 - protein, 10 aa, Severe acute respiratory syndrome coronavirus 2
KCVNFNFNGL

SEQ ID NO: 8160 - protein, 9 aa, Severe acute respiratory syndrome coronavirus 2
CVNFNFNGL

SEQ ID NO: 8161 - protein, 10 aa, Severe acute respiratory syndrome coronavirus 2
GTGVLTESNK

SEQ ID NO: 8162 - protein, 9 aa, Severe acute respiratory syndrome coronavirus 2
GVLTESNKK

SEQ ID NO: 8163 - protein, 9 aa, Severe acute respiratory syndrome coronavirus 2
LTESNKKFL

SEQ ID NO: 8164 - protein, 10 aa, Severe acute respiratory syndrome coronavirus 2
LTESNKKFLP

SEQ ID NO: 8165 - protein, 10 aa, Severe acute respiratory syndrome coronavirus 2
TESNKKFLPF

SEQ ID NO: 8166 - protein, 9 aa, Severe acute respiratory syndrome coronavirus 2
ESNKKFLPF

SEQ ID NO: 8167 - protein, 9 aa, Severe acute respiratory syndrome coronavirus 2
KKFLPFQQF

SEQ ID NO: 8168 - protein, 9 aa, Severe acute respiratory syndrome coronavirus 2
KFLPFQQFG

SEQ ID NO: 8169 - protein, 10 aa, Severe acute respiratory syndrome coronavirus 2
LPFQQFGRDI

SEQ ID NO: 8170 - protein, 9 aa, Severe acute respiratory syndrome coronavirus 2
PFQQFGRDI

SEQ ID NO: 8171 - protein, 9 aa, Severe acute respiratory syndrome coronavirus 2
TTDAVRDPQ

SEQ ID NO: 8172 - protein, 10 aa, Severe acute respiratory syndrome coronavirus 2
TTDAVRDPQT

SEQ ID NO: 8173 - protein, 9 aa, Severe acute respiratory syndrome coronavirus 2
LEILDITPC

SEQ ID NO: 8174 - protein, 9 aa, Severe acute respiratory syndrome coronavirus 2
ILDITPCSF

SEQ ID NO: 8175 - protein, 10 aa, Severe acute respiratory syndrome coronavirus 2
ILDITPCSFG

SEQ ID NO: 8176 - protein, 9 aa, Severe acute respiratory syndrome coronavirus 2
ITPCSFGGV

SEQ ID NO: 8177 - protein, 10 aa, Severe acute respiratory syndrome coronavirus 2
TPCSFGGVSV

SEQ ID NO: 8178 - protein, 10 aa, Severe acute respiratory syndrome coronavirus 2
TPGTNTSNQV

SEQ ID NO: 8179 - protein, 9 aa, Severe acute respiratory syndrome coronavirus 2
GTNTSNQVA

SEQ ID NO: 8180 - protein, 10 aa, Severe acute respiratory syndrome coronavirus 2
TNTSNQVAVL

SEQ ID NO: 8181 - protein, 9 aa, Severe acute respiratory syndrome coronavirus 2
NTSNQVAVL

SEQ ID NO: 8182 - protein, 10 aa, Severe acute respiratory syndrome coronavirus 2
NTSNQVAVLY

SEQ ID NO: 8183 - protein, 9 aa, Severe acute respiratory syndrome coronavirus 2
TSNQVAVLY

SEQ ID NO: 8184 - protein, 9 aa, Severe acute respiratory syndrome coronavirus 2
VLYQDVNCT

SEQ ID NO: 8185 - protein, 9 aa, Severe acute respiratory syndrome coronavirus 2
LYQDVNCTE

SEQ ID NO: 8186 - protein, 10 aa, Severe acute respiratory syndrome coronavirus 2
LYQDVNCTEV

SEQ ID NO: 8187 - protein, 9 aa, Severe acute respiratory syndrome coronavirus 2
YQDVNCTEV

SEQ ID NO: 8188 - protein, 9 aa, Severe acute respiratory syndrome coronavirus 2
CTEVPVAIH

SEQ ID NO: 8189 - protein, 10 aa, Severe acute respiratory syndrome coronavirus 2
CTEVPVAIHA

SEQ ID NO: 8190 - protein, 9 aa, Severe acute respiratory syndrome coronavirus 2
TEVPVAIHA

SEQ ID NO: 8191 - protein, 10 aa, Severe acute respiratory syndrome coronavirus 2
VPVAIHADQL

SEQ ID NO: 8192 - protein, 10 aa, Severe acute respiratory syndrome coronavirus 2
IHADQLTPTW

SEQ ID NO: 8193 - protein, 9 aa, Severe acute respiratory syndrome coronavirus 2
HADQLTPTW

SEQ ID NO: 8194 - protein, 10 aa, Severe acute respiratory syndrome coronavirus 2
HADQLTPTWR

SEQ ID NO: 8195 - protein, 9 aa, Severe acute respiratory syndrome coronavirus 2
QLTPTWRVY

SEQ ID NO: 8196 - protein, 9 aa, Severe acute respiratory syndrome coronavirus 2
TPTWRVYST

SEQ ID NO: 8197 - protein, 10 aa, Severe acute respiratory syndrome coronavirus 2
TPTWRVYSTG

SEQ ID NO: 8198 - protein, 9 aa, Severe acute respiratory syndrome coronavirus 2
RVYSTGSNV

SEQ ID NO: 8199 - protein, 10 aa, Severe acute respiratory syndrome coronavirus 2
RVYSTGSNVF

SEQ ID NO: 8200 - protein, 9 aa, Severe acute respiratory syndrome coronavirus 2
VYSTGSNVF

SEQ ID NO: 8201 - protein, 10 aa, Severe acute respiratory syndrome coronavirus 2
VYSTGSNVFQ

SEQ ID NO: 8202 - protein, 9 aa, Severe acute respiratory syndrome coronavirus 2
VFQTRAGCL

SEQ ID NO: 8203 - protein, 10 aa, Severe acute respiratory syndrome coronavirus 2
VFQTRAGCLI

SEQ ID NO: 8204 - protein, 9 aa, Severe acute respiratory syndrome coronavirus 2
FQTRAGCLI

SEQ ID NO: 8205 - protein, 10 aa, Severe acute respiratory syndrome coronavirus 2
IGAEHVNNSY

SEQ ID NO: 8206 - protein, 9 aa, Severe acute respiratory syndrome coronavirus 2
AEHVNNSYE

SEQ ID NO: 8207 - protein, 10 aa, Severe acute respiratory syndrome coronavirus 2
AEHVNNSYEC

SEQ ID NO: 8208 - protein, 10 aa, Severe acute respiratory syndrome coronavirus 2
YECDIPIGAG

SEQ ID NO: 8209 - protein, 9 aa, Severe acute respiratory syndrome coronavirus 2
IGAGICASY

SEQ ID NO: 8210 - protein, 9 aa, Severe acute respiratory syndrome coronavirus 2
SYQTQTNSP

SEQ ID NO: 8211 - protein, 10 aa, Severe acute respiratory syndrome coronavirus 2
SYQTQTNSPR

SEQ ID NO: 8212 - protein, 10 aa, Severe acute respiratory syndrome coronavirus 2
TNSPRRARSV

SEQ ID NO: 8213 - protein, 10 aa, Severe acute respiratory syndrome coronavirus 2
SPRRARSVAS

SEQ ID NO: 8214 - protein, 10 aa, Severe acute respiratory syndrome coronavirus 2
RARSVASQSI

SEQ ID NO: 8215 - protein, 10 aa, Severe acute respiratory syndrome coronavirus 2
SVASQSIIAY

SEQ ID NO: 8216 - protein, 9 aa, Severe acute respiratory syndrome coronavirus 2
VASQSIIAY

SEQ ID NO: 8217 - protein, 10 aa, Severe acute respiratory syndrome coronavirus 2
ASQSIIAYTM

SEQ ID NO: 8218 - protein, 10 aa, Severe acute respiratory syndrome coronavirus 2
QSIIAYTMSL

SEQ ID NO: 8219 - protein, 9 aa, Severe acute respiratory syndrome coronavirus 2
SIIAYTMSL

SEQ ID NO: 8220 - protein, 10 aa, Severe acute respiratory syndrome coronavirus 2
SIIAYTMSLG

SEQ ID NO: 8221 - protein, 10 aa, Severe acute respiratory syndrome coronavirus 2
IIAYTMSLGA

SEQ ID NO: 8222 - protein, 10 aa, Severe acute respiratory syndrome coronavirus 2
AYTMSLGAEN

SEQ ID NO: 8223 - protein, 10 aa, Severe acute respiratory syndrome coronavirus 2
YTMSLGAENS

SEQ ID NO: 8224 - protein, 10 aa, Severe acute respiratory syndrome coronavirus 2
TMSLGAENSV

SEQ ID NO: 8225 - protein, 9 aa, Severe acute respiratory syndrome coronavirus 2
LGAENSVAY

SEQ ID NO: 8226 - protein, 9 aa, Severe acute respiratory syndrome coronavirus 2
AENSVAYSN

SEQ ID NO: 8227 - protein, 10 aa, Severe acute respiratory syndrome coronavirus 2
AENSVAYSNN

SEQ ID NO: 8228 - protein, 9 aa, Severe acute respiratory syndrome coronavirus 2
SVAYSNNSI

SEQ ID NO: 8229 - protein, 10 aa, Severe acute respiratory syndrome coronavirus 2
SVAYSNNSIA

SEQ ID NO: 8230 - protein, 9 aa, Severe acute respiratory syndrome coronavirus 2
AYSNNSIAI

SEQ ID NO: 8231 - protein, 10 aa, Severe acute respiratory syndrome coronavirus 2
NNSIAIPTNF

SEQ ID NO: 8232 - protein, 9 aa, Severe acute respiratory syndrome coronavirus 2
NSIAIPTNF

SEQ ID NO: 8233 - protein, 10 aa, Severe acute respiratory syndrome coronavirus 2
SIAIPTNFTI

SEQ ID NO: 8234 - protein, 9 aa, Severe acute respiratory syndrome coronavirus 2
IAIPTNFTI

SEQ ID NO: 8235 - protein, 10 aa, Severe acute respiratory syndrome coronavirus 2
AIPTNFTISV

SEQ ID NO: 8236 - protein, 9 aa, Severe acute respiratory syndrome coronavirus 2
IPTNFTISV

SEQ ID NO: 8237 - protein, 10 aa, Severe acute respiratory syndrome coronavirus 2
NFTISVTTEI

SEQ ID NO: 8238 - protein, 9 aa, Severe acute respiratory syndrome coronavirus 2
FTISVTTEI

SEQ ID NO: 8239 - protein, 10 aa, Severe acute respiratory syndrome coronavirus 2
FTISVTTEIL

SEQ ID NO: 8240 - protein, 10 aa, Severe acute respiratory syndrome coronavirus 2
ISVTTEILPV

SEQ ID NO: 8241 - protein, 9 aa, Severe acute respiratory syndrome coronavirus 2
SVTTEILPV

SEQ ID NO: 8242 - protein, 9 aa, Severe acute respiratory syndrome coronavirus 2
TTEILPVSM

SEQ ID NO: 8243 - protein, 10 aa, Severe acute respiratory syndrome coronavirus 2
TTEILPVSMT

SEQ ID NO: 8244 - protein, 9 aa, Severe acute respiratory syndrome coronavirus 2
TEILPVSMT

SEQ ID NO: 8245 - protein, 10 aa, Severe acute respiratory syndrome coronavirus 2
TEILPVSMTK

SEQ ID NO: 8246 - protein, 9 aa, Severe acute respiratory syndrome coronavirus 2
EILPVSMTK

SEQ ID NO: 8247 - protein, 9 aa, Severe acute respiratory syndrome coronavirus 2
LPVSMTKTS

SEQ ID NO: 8248 - protein, 10 aa, Severe acute respiratory syndrome coronavirus 2
LPVSMTKTSV

SEQ ID NO: 8249 - protein, 10 aa, Severe acute respiratory syndrome coronavirus 2
MTKTSVDCTM

SEQ ID NO: 8250 - protein, 9 aa, Severe acute respiratory syndrome coronavirus 2
KTSVDCTMY

SEQ ID NO: 8251 - protein, 10 aa, Severe acute respiratory syndrome coronavirus 2
KTSVDCTMYI

SEQ ID NO: 8252 - protein, 9 aa, Severe acute respiratory syndrome coronavirus 2
TSVDCTMYI

SEQ ID NO: 8253 - protein, 9 aa, Severe acute respiratory syndrome coronavirus 2
CTMYICGDS

SEQ ID NO: 8254 - protein, 10 aa, Severe acute respiratory syndrome coronavirus 2
CTMYICGDST

SEQ ID NO: 8255 - protein, 9 aa, Severe acute respiratory syndrome coronavirus 2
TMYICGDST

SEQ ID NO: 8256 - protein, 10 aa, Severe acute respiratory syndrome coronavirus 2
TMYICGDSTE

SEQ ID NO: 8257 - protein, 9 aa, Severe acute respiratory syndrome coronavirus 2
MYICGDSTE

SEQ ID NO: 8258 - protein, 9 aa, Severe acute respiratory syndrome coronavirus 2
DSTECSNLL

SEQ ID NO: 8259 - protein, 9 aa, Severe acute respiratory syndrome coronavirus 2
STECSNLLL

SEQ ID NO: 8260 - protein, 10 aa, Severe acute respiratory syndrome coronavirus 2
STECSNLLLQ

SEQ ID NO: 8261 - protein, 10 aa, Severe acute respiratory syndrome coronavirus 2
TECSNLLLQY

SEQ ID NO: 8262 - protein, 9 aa, Severe acute respiratory syndrome coronavirus 2
ECSNLLLQY

SEQ ID NO: 8263 - protein, 9 aa, Severe acute respiratory syndrome coronavirus 2
CSNLLLQYG

SEQ ID NO: 8264 - protein, 9 aa, Severe acute respiratory syndrome coronavirus 2
LLLQYGSFC

SEQ ID NO: 8265 - protein, 10 aa, Severe acute respiratory syndrome coronavirus 2
LLLQYGSFCT

SEQ ID NO: 8266 - protein, 9 aa, Severe acute respiratory syndrome coronavirus 2
LLQYGSFCT

SEQ ID NO: 8267 - protein, 10 aa, Severe acute respiratory syndrome coronavirus 2
LQYGSFCTQL

SEQ ID NO: 8268 - protein, 9 aa, Severe acute respiratory syndrome coronavirus 2
QYGSFCTQL

SEQ ID NO: 8269 - protein, 9 aa, Severe acute respiratory syndrome coronavirus 2
GSFCTQLNR

SEQ ID NO: 8270 - protein, 10 aa, Severe acute respiratory syndrome coronavirus 2
SFCTQLNRAL

SEQ ID NO: 8271 - protein, 10 aa, Severe acute respiratory syndrome coronavirus 2
TQLNRALTGI

SEQ ID NO: 8272 - protein, 9 aa, Severe acute respiratory syndrome coronavirus 2
QLNRALTGI

SEQ ID NO: 8273 - protein, 10 aa, Severe acute respiratory syndrome coronavirus 2
AVEQDKNTQE

SEQ ID NO: 8274 - protein, 9 aa, Severe acute respiratory syndrome coronavirus 2
VEQDKNTQE

SEQ ID NO: 8275 - protein, 9 aa, Severe acute respiratory syndrome coronavirus 2
EQDKNTQEV

SEQ ID NO: 8276 - protein, 9 aa, Severe acute respiratory syndrome coronavirus 2
NTQEVFAQV

SEQ ID NO: 8277 - protein, 10 aa, Severe acute respiratory syndrome coronavirus 2
QEVFAQVKQI

SEQ ID NO: 8278 - protein, 10 aa, Severe acute respiratory syndrome coronavirus 2
EVFAQVKQIY

SEQ ID NO: 8279 - protein, 9 aa, Severe acute respiratory syndrome coronavirus 2
KQIYKTPPI

SEQ ID NO: 8280 - protein, 10 aa, Severe acute respiratory syndrome coronavirus 2
KQIYKTPPIK

SEQ ID NO: 8281 - protein, 9 aa, Severe acute respiratory syndrome coronavirus 2
QIYKTPPIK

SEQ ID NO: 8282 - protein, 10 aa, Severe acute respiratory syndrome coronavirus 2
TPPIKDFGGF

SEQ ID NO: 8283 - protein, 10 aa, Severe acute respiratory syndrome coronavirus 2
PIKDFGGFNF

SEQ ID NO: 8284 - protein, 10 aa, Severe acute respiratory syndrome coronavirus 2
IKDFGGFNFS

SEQ ID NO: 8285 - protein, 10 aa, Severe acute respiratory syndrome coronavirus 2
GFNFSQILPD

SEQ ID NO: 8286 - protein, 10 aa, Severe acute respiratory syndrome coronavirus 2
FSQILPDPSK

SEQ ID NO: 8287 - protein, 10 aa, Severe acute respiratory syndrome coronavirus 2
ILPDPSKPSK

SEQ ID NO: 8288 - protein, 10 aa, Severe acute respiratory syndrome coronavirus 2
LPDPSKPSKR

SEQ ID NO: 8289 - protein, 10 aa, Severe acute respiratory syndrome coronavirus 2
DPSKPSKRSF

SEQ ID NO: 8290 - protein, 10 aa, Severe acute respiratory syndrome coronavirus 2
KPSKRSFIED

SEQ ID NO: 8291 - protein, 9 aa, Severe acute respiratory syndrome coronavirus 2
RSFIEDLLF

SEQ ID NO: 8292 - protein, 9 aa, Severe acute respiratory syndrome coronavirus 2
FIEDLLFNK

SEQ ID NO: 8293 - protein, 10 aa, Severe acute respiratory syndrome coronavirus 2
FIEDLLFNKV

SEQ ID NO: 8294 - protein, 9 aa, Severe acute respiratory syndrome coronavirus 2
EDLLFNKVT

SEQ ID NO: 8295 - protein, 9 aa, Severe acute respiratory syndrome coronavirus 2
LLFNKVTLA

SEQ ID NO: 8296 - protein, 10 aa, Severe acute respiratory syndrome coronavirus 2
LLFNKVTLAD

SEQ ID NO: 8297 - protein, 10 aa, Severe acute respiratory syndrome coronavirus 2
VTLADAGFIK

SEQ ID NO: 8298 - protein, 9 aa, Severe acute respiratory syndrome coronavirus 2
TLADAGFIK

SEQ ID NO: 8299 - protein, 10 aa, Severe acute respiratory syndrome coronavirus 2
LADAGFIKQY

SEQ ID NO: 8300 - protein, 9 aa, Severe acute respiratory syndrome coronavirus 2
ADAGFIKQY

SEQ ID NO: 8301 - protein, 10 aa, Severe acute respiratory syndrome coronavirus 2
ADAGFIKQYG

SEQ ID NO: 8302 - protein, 9 aa, Severe acute respiratory syndrome coronavirus 2
FIKQYGDCL

SEQ ID NO: 8303 - protein, 10 aa, Severe acute respiratory syndrome coronavirus 2
KQYGDCLGDI

SEQ ID NO: 8304 - protein, 9 aa, Severe acute respiratory syndrome coronavirus 2
QYGDCLGDI

SEQ ID NO: 8305 - protein, 9 aa, Severe acute respiratory syndrome coronavirus 2
GDIAARDLI

SEQ ID NO: 8306 - protein, 10 aa, Severe acute respiratory syndrome coronavirus 2
AARDLICAQK

SEQ ID NO: 8307 - protein, 9 aa, Severe acute respiratory syndrome coronavirus 2
RDLICAQKF

SEQ ID NO: 8308 - protein, 10 aa, Severe acute respiratory syndrome coronavirus 2
LICAQKFNGL

SEQ ID NO: 8309 - protein, 9 aa, Severe acute respiratory syndrome coronavirus 2
ICAQKFNGL

SEQ ID NO: 8310 - protein, 10 aa, Severe acute respiratory syndrome coronavirus 2
AQKFNGLTVL

SEQ ID NO: 8311 - protein, 10 aa, Severe acute respiratory syndrome coronavirus 2
LTVLPPLLTD

SEQ ID NO: 8312 - protein, 9 aa, Severe acute respiratory syndrome coronavirus 2
LPPLLTDEM

SEQ ID NO: 8313 - protein, 10 aa, Severe acute respiratory syndrome coronavirus 2
LPPLLTDEMI

SEQ ID NO: 8314 - protein, 10 aa, Severe acute respiratory syndrome coronavirus 2
LLTDEMIAQY

SEQ ID NO: 8315 - protein, 9 aa, Severe acute respiratory syndrome coronavirus 2
LTDEMIAQY

SEQ ID NO: 8316 - protein, 10 aa, Severe acute respiratory syndrome coronavirus 2
LTDEMIAQYT

SEQ ID NO: 8317 - protein, 9 aa, Severe acute respiratory syndrome coronavirus 2
DEMIAQYTS

SEQ ID NO: 8318 - protein, 10 aa, Severe acute respiratory syndrome coronavirus 2
DEMIAQYTSA

SEQ ID NO: 8319 - protein, 10 aa, Severe acute respiratory syndrome coronavirus 2
EMIAQYTSAL

SEQ ID NO: 8320 - protein, 9 aa, Severe acute respiratory syndrome coronavirus 2
MIAQYTSAL

SEQ ID NO: 8321 - protein, 10 aa, Severe acute respiratory syndrome coronavirus 2
MIAQYTSALL

SEQ ID NO: 8322 - protein, 9 aa, Severe acute respiratory syndrome coronavirus 2
IAQYTSALL

SEQ ID NO: 8323 - protein, 10 aa, Severe acute respiratory syndrome coronavirus 2
YTSALLAGTI

SEQ ID NO: 8324 - protein, 10 aa, Severe acute respiratory syndrome coronavirus 2
ALLAGTITSG

SEQ ID NO: 8325 - protein, 9 aa, Severe acute respiratory syndrome coronavirus 2
LLAGTITSG

SEQ ID NO: 8326 - protein, 10 aa, Severe acute respiratory syndrome coronavirus 2
AGTITSGWTF

SEQ ID NO: 8327 - protein, 9 aa, Severe acute respiratory syndrome coronavirus 2
GTITSGWTF

SEQ ID NO: 8328 - protein, 10 aa, Severe acute respiratory syndrome coronavirus 2
TITSGWTFGA

SEQ ID NO: 8329 - protein, 9 aa, Severe acute respiratory syndrome coronavirus 2
ITSGWTFGA

SEQ ID NO: 8330 - protein, 10 aa, Severe acute respiratory syndrome coronavirus 2
GWTFGAGAAL

SEQ ID NO: 8331 - protein, 9 aa, Severe acute respiratory syndrome coronavirus 2
AALQIPFAM

SEQ ID NO: 8332 - protein, 9 aa, Severe acute respiratory syndrome coronavirus 2
LQIPFAMQM

SEQ ID NO: 8333 - protein, 10 aa, Severe acute respiratory syndrome coronavirus 2
LQIPFAMQMA

SEQ ID NO: 8334 - protein, 10 aa, Severe acute respiratory syndrome coronavirus 2
QIPFAMQMAY

SEQ ID NO: 8335 - protein, 9 aa, Severe acute respiratory syndrome coronavirus 2
IPFAMQMAY

SEQ ID NO: 8336 - protein, 10 aa, Severe acute respiratory syndrome coronavirus 2
PFAMQMAYRF

SEQ ID NO: 8337 - protein, 9 aa, Severe acute respiratory syndrome coronavirus 2
FAMQMAYRF

SEQ ID NO: 8338 - protein, 10 aa, Severe acute respiratory syndrome coronavirus 2
MQMAYRFNGI

SEQ ID NO: 8339 - protein, 9 aa, Severe acute respiratory syndrome coronavirus 2
QMAYRFNGI

SEQ ID NO: 8340 - protein, 10 aa, Severe acute respiratory syndrome coronavirus 2
MAYRFNGIGV

SEQ ID NO: 8341 - protein, 9 aa, Severe acute respiratory syndrome coronavirus 2
VLYENQKLI

SEQ ID NO: 8342 - protein, 9 aa, Severe acute respiratory syndrome coronavirus 2
YENQKLIAN

SEQ ID NO: 8343 - protein, 9 aa, Severe acute respiratory syndrome coronavirus 2
NQKLIANQF

SEQ ID NO: 8344 - protein, 9 aa, Severe acute respiratory syndrome coronavirus 2
KLIANQFNS

SEQ ID NO: 8345 - protein, 10 aa, Severe acute respiratory syndrome coronavirus 2
KLIANQFNSA

SEQ ID NO: 8346 - protein, 9 aa, Severe acute respiratory syndrome coronavirus 2
LIANQFNSA

SEQ ID NO: 8347 - protein, 10 aa, Severe acute respiratory syndrome coronavirus 2
LIANQFNSAI

SEQ ID NO: 8348 - protein, 9 aa, Severe acute respiratory syndrome coronavirus 2
NQFNSAIGK

SEQ ID NO: 8349 - protein, 9 aa, Severe acute respiratory syndrome coronavirus 2
QFNSAIGKI

SEQ ID NO: 8350 - protein, 10 aa, Severe acute respiratory syndrome coronavirus 2
LSSTASALGK

SEQ ID NO: 8351 - protein, 10 aa, Severe acute respiratory syndrome coronavirus 2
SSTASALGKL

SEQ ID NO: 8352 - protein, 9 aa, Severe acute respiratory syndrome coronavirus 2
VVNQNAQAL

SEQ ID NO: 8353 - protein, 10 aa, Severe acute respiratory syndrome coronavirus 2
NQNAQALNTL

SEQ ID NO: 8354 - protein, 10 aa, Severe acute respiratory syndrome coronavirus 2
NAQALNTLVK

SEQ ID NO: 8355 - protein, 9 aa, Severe acute respiratory syndrome coronavirus 2
AQALNTLVK

SEQ ID NO: 8356 - protein, 9 aa, Severe acute respiratory syndrome coronavirus 2
ALNTLVKQL

SEQ ID NO: 8357 - protein, 9 aa, Severe acute respiratory syndrome coronavirus 2
KQLSSNFGA

SEQ ID NO: 8358 - protein, 10 aa, Severe acute respiratory syndrome coronavirus 2
KQLSSNFGAI

SEQ ID NO: 8359 - protein, 9 aa, Severe acute respiratory syndrome coronavirus 2
QLSSNFGAI

SEQ ID NO: 8360 - protein, 9 aa, Severe acute respiratory syndrome coronavirus 2
LSSNFGAIS

SEQ ID NO: 8361 - protein, 10 aa, Severe acute respiratory syndrome coronavirus 2
SSNFGAISSV

SEQ ID NO: 8362 - protein, 9 aa, Severe acute respiratory syndrome coronavirus 2
SNFGAISSV

SEQ ID NO: 8363 - protein, 10 aa, Severe acute respiratory syndrome coronavirus 2
SNFGAISSVL

SEQ ID NO: 8364 - protein, 9 aa, Severe acute respiratory syndrome coronavirus 2
NFGAISSVL

SEQ ID NO: 8365 - protein, 9 aa, Severe acute respiratory syndrome coronavirus 2
AISSVLNDI

SEQ ID NO: 8366 - protein, 10 aa, Severe acute respiratory syndrome coronavirus 2
SVLNDILSRL

SEQ ID NO: 8367 - protein, 9 aa, Severe acute respiratory syndrome coronavirus 2
VLNDILSRL

SEQ ID NO: 8368 - protein, 9 aa, Severe acute respiratory syndrome coronavirus 2
RLDKVEAEV

SEQ ID NO: 8369 - protein, 9 aa, Severe acute respiratory syndrome coronavirus 2
AEVQIDRLI

SEQ ID NO: 8370 - protein, 10 aa, Severe acute respiratory syndrome coronavirus 2
AEVQIDRLIT

SEQ ID NO: 8371 - protein, 10 aa, Severe acute respiratory syndrome coronavirus 2
QIDRLITGRL

SEQ ID NO: 8372 - protein, 9 aa, Severe acute respiratory syndrome coronavirus 2
IDRLITGRL

SEQ ID NO: 8373 - protein, 10 aa, Severe acute respiratory syndrome coronavirus 2
RLITGRLQSL

SEQ ID NO: 8374 - protein, 9 aa, Severe acute respiratory syndrome coronavirus 2
RLQSLQTYV

SEQ ID NO: 8375 - protein, 10 aa, Severe acute respiratory syndrome coronavirus 2
SLQTYVTQQL

SEQ ID NO: 8376 - protein, 9 aa, Severe acute respiratory syndrome coronavirus 2
LQTYVTQQL

SEQ ID NO: 8377 - protein, 9 aa, Severe acute respiratory syndrome coronavirus 2
QTYVTQQLI

SEQ ID NO: 8378 - protein, 9 aa, Severe acute respiratory syndrome coronavirus 2
RAAEIRASA

SEQ ID NO: 8379 - protein, 9 aa, Severe acute respiratory syndrome coronavirus 2
AEIRASANL

SEQ ID NO: 8380 - protein, 10 aa, Severe acute respiratory syndrome coronavirus 2
AEIRASANLA

SEQ ID NO: 8381 - protein, 10 aa, Severe acute respiratory syndrome coronavirus 2
RASANLAATK

SEQ ID NO: 8382 - protein, 9 aa, Severe acute respiratory syndrome coronavirus 2
ASANLAATK

SEQ ID NO: 8383 - protein, 10 aa, Severe acute respiratory syndrome coronavirus 2
ASANLAATKM

SEQ ID NO: 8384 - protein, 9 aa, Severe acute respiratory syndrome coronavirus 2
SANLAATKM

SEQ ID NO: 8385 - protein, 9 aa, Severe acute respiratory syndrome coronavirus 2
KMSECVLGQ

SEQ ID NO: 8386 - protein, 9 aa, Severe acute respiratory syndrome coronavirus 2
MSECVLGQS

SEQ ID NO: 8387 - protein, 10 aa, Severe acute respiratory syndrome coronavirus 2
MSECVLGQSK

SEQ ID NO: 8388 - protein, 10 aa, Severe acute respiratory syndrome coronavirus 2
QSKRVDFCGK

SEQ ID NO: 8389 - protein, 10 aa, Severe acute respiratory syndrome coronavirus 2
KRVDFCGKGY

SEQ ID NO: 8390 - protein, 9 aa, Severe acute respiratory syndrome coronavirus 2
RVDFCGKGY

SEQ ID NO: 8391 - protein, 10 aa, Severe acute respiratory syndrome coronavirus 2
RVDFCGKGYH

SEQ ID NO: 8392 - protein, 10 aa, Severe acute respiratory syndrome coronavirus 2
VDFCGKGYHL

SEQ ID NO: 8393 - protein, 9 aa, Severe acute respiratory syndrome coronavirus 2
HLMSFPQSA

SEQ ID NO: 8394 - protein, 10 aa, Severe acute respiratory syndrome coronavirus 2
HLMSFPQSAP

SEQ ID NO: 8395 - protein, 9 aa, Severe acute respiratory syndrome coronavirus 2
MSFPQSAPH

SEQ ID NO: 8396 - protein, 9 aa, Severe acute respiratory syndrome coronavirus 2
FPQSAPHGV

SEQ ID NO: 8397 - protein, 10 aa, Severe acute respiratory syndrome coronavirus 2
FPQSAPHGVV

SEQ ID NO: 8398 - protein, 9 aa, Severe acute respiratory syndrome coronavirus 2
QSAPHGVVF

SEQ ID NO: 8399 - protein, 10 aa, Severe acute respiratory syndrome coronavirus 2
QSAPHGVVFL

SEQ ID NO: 8400 - protein, 9 aa, Severe acute respiratory syndrome coronavirus 2
APHGVVFLH

SEQ ID NO: 8401 - protein, 10 aa, Severe acute respiratory syndrome coronavirus 2
APHGVVFLHV

SEQ ID NO: 8402 - protein, 10 aa, Severe acute respiratory syndrome coronavirus 2
HGVVFLHVTY

SEQ ID NO: 8403 - protein, 9 aa, Severe acute respiratory syndrome coronavirus 2
GVVFLHVTY

SEQ ID NO: 8404 - protein, 10 aa, Severe acute respiratory syndrome coronavirus 2
GVVFLHVTYV

SEQ ID NO: 8405 - protein, 9 aa, Severe acute respiratory syndrome coronavirus 2
VVFLHVTYV

SEQ ID NO: 8406 - protein, 9 aa, Severe acute respiratory syndrome coronavirus 2
FLHVTYVPA

SEQ ID NO: 8407 - protein, 10 aa, Severe acute respiratory syndrome coronavirus 2
HVTYVPAQEK

SEQ ID NO: 8408 - protein, 9 aa, Severe acute respiratory syndrome coronavirus 2
VTYVPAQEK

SEQ ID NO: 8409 - protein, 10 aa, Severe acute respiratory syndrome coronavirus 2
TYVPAQEKNF

SEQ ID NO: 8410 - protein, 9 aa, Severe acute respiratory syndrome coronavirus 2
QEKNFTTAP

SEQ ID NO: 8411 - protein, 10 aa, Severe acute respiratory syndrome coronavirus 2
QEKNFTTAPA

SEQ ID NO: 8412 - protein, 9 aa, Severe acute respiratory syndrome coronavirus 2
FTTAPAICH

SEQ ID NO: 8413 - protein, 10 aa, Severe acute respiratory syndrome coronavirus 2
TTAPAICHDG

SEQ ID NO: 8414 - protein, 10 aa, Severe acute respiratory syndrome coronavirus 2
TAPAICHDGK

SEQ ID NO: 8415 - protein, 10 aa, Severe acute respiratory syndrome coronavirus 2
APAICHDGKA

SEQ ID NO: 8416 - protein, 9 aa, Severe acute respiratory syndrome coronavirus 2
AICHDGKAH

SEQ ID NO: 8417 - protein, 10 aa, Severe acute respiratory syndrome coronavirus 2
AICHDGKAHF

SEQ ID NO: 8418 - protein, 9 aa, Severe acute respiratory syndrome coronavirus 2
FPREGVFVS

SEQ ID NO: 8419 - protein, 10 aa, Severe acute respiratory syndrome coronavirus 2
FPREGVFVSN

SEQ ID NO: 8420 - protein, 10 aa, Severe acute respiratory syndrome coronavirus 2
REGVFVSNGT

SEQ ID NO: 8421 - protein, 9 aa, Severe acute respiratory syndrome coronavirus 2
GVFVSNGTH

SEQ ID NO: 8422 - protein, 10 aa, Severe acute respiratory syndrome coronavirus 2
GVFVSNGTHW

SEQ ID NO: 8423 - protein, 9 aa, Severe acute respiratory syndrome coronavirus 2
VFVSNGTHW

SEQ ID NO: 8424 - protein, 10 aa, Severe acute respiratory syndrome coronavirus 2
VFVSNGTHWF

SEQ ID NO: 8425 - protein, 9 aa, Severe acute respiratory syndrome coronavirus 2
FVSNGTHWF

SEQ ID NO: 8426 - protein, 10 aa, Severe acute respiratory syndrome coronavirus 2
FVSNGTHWFV

SEQ ID NO: 8427 - protein, 9 aa, Severe acute respiratory syndrome coronavirus 2
VSNGTHWFV

SEQ ID NO: 8428 - protein, 9 aa, Severe acute respiratory syndrome coronavirus 2
GTHWFVTQR

SEQ ID NO: 8429 - protein, 10 aa, Severe acute respiratory syndrome coronavirus 2
THWFVTQRNF

SEQ ID NO: 8430 - protein, 9 aa, Severe acute respiratory syndrome coronavirus 2
HWFVTQRNF

SEQ ID NO: 8431 - protein, 10 aa, Severe acute respiratory syndrome coronavirus 2
HWFVTQRNFY

SEQ ID NO: 8432 - protein, 9 aa, Severe acute respiratory syndrome coronavirus 2
YEPQIITTD

SEQ ID NO: 8433 - protein, 10 aa, Severe acute respiratory syndrome coronavirus 2
YEPQIITTDN

SEQ ID NO: 8434 - protein, 10 aa, Severe acute respiratory syndrome coronavirus 2
PQIITTDNTF

SEQ ID NO: 8435 - protein, 9 aa, Severe acute respiratory syndrome coronavirus 2
QIITTDNTF

SEQ ID NO: 8436 - protein, 10 aa, Severe acute respiratory syndrome coronavirus 2
QIITTDNTFV

SEQ ID NO: 8437 - protein, 9 aa, Severe acute respiratory syndrome coronavirus 2
IITTDNTFV

SEQ ID NO: 8438 - protein, 9 aa, Severe acute respiratory syndrome coronavirus 2
ITTDNTFVS

SEQ ID NO: 8439 - protein, 10 aa, Severe acute respiratory syndrome coronavirus 2
TTDNTFVSGN

SEQ ID NO: 8440 - protein, 9 aa, Severe acute respiratory syndrome coronavirus 2
NTFVSGNCD

SEQ ID NO: 8441 - protein, 9 aa, Severe acute respiratory syndrome coronavirus 2
FVSGNCDVV

SEQ ID NO: 8442 - protein, 10 aa, Severe acute respiratory syndrome coronavirus 2
FVSGNCDVVI

SEQ ID NO: 8443 - protein, 9 aa, Severe acute respiratory syndrome coronavirus 2
NCDVVIGIV

SEQ ID NO: 8444 - protein, 10 aa, Severe acute respiratory syndrome coronavirus 2
VVIGIVNNTV

SEQ ID NO: 8445 - protein, 9 aa, Severe acute respiratory syndrome coronavirus 2
VIGIVNNTV

SEQ ID NO: 8446 - protein, 10 aa, Severe acute respiratory syndrome coronavirus 2
VIGIVNNTVY

SEQ ID NO: 8447 - protein, 9 aa, Severe acute respiratory syndrome coronavirus 2
IGIVNNTVY

SEQ ID NO: 8448 - protein, 9 aa, Severe acute respiratory syndrome coronavirus 2
VYDPLQPEL

SEQ ID NO: 8449 - protein, 10 aa, Severe acute respiratory syndrome coronavirus 2
VYDPLQPELD

SEQ ID NO: 8450 - protein, 9 aa, Severe acute respiratory syndrome coronavirus 2
PLQPELDSF

SEQ ID NO: 8451 - protein, 10 aa, Severe acute respiratory syndrome coronavirus 2
PLQPELDSFK

SEQ ID NO: 8452 - protein, 10 aa, Severe acute respiratory syndrome coronavirus 2
ELDSFKEELD

SEQ ID NO: 8453 - protein, 9 aa, Severe acute respiratory syndrome coronavirus 2
DSFKEELDK

SEQ ID NO: 8454 - protein, 10 aa, Severe acute respiratory syndrome coronavirus 2
DSFKEELDKY

SEQ ID NO: 8455 - protein, 10 aa, Severe acute respiratory syndrome coronavirus 2
SFKEELDKYF

SEQ ID NO: 8456 - protein, 10 aa, Severe acute respiratory syndrome coronavirus 2
FKEELDKYFK

SEQ ID NO: 8457 - protein, 10 aa, Severe acute respiratory syndrome coronavirus 2
KEELDKYFKN

SEQ ID NO: 8458 - protein, 9 aa, Severe acute respiratory syndrome coronavirus 2
EELDKYFKN

SEQ ID NO: 8459 - protein, 10 aa, Severe acute respiratory syndrome coronavirus 2
EELDKYFKNH

SEQ ID NO: 8460 - protein, 10 aa, Severe acute respiratory syndrome coronavirus 2
ELDKYFKNHT

SEQ ID NO: 8461 - protein, 9 aa, Severe acute respiratory syndrome coronavirus 2
KYFKNHTSP

SEQ ID NO: 8462 - protein, 10 aa, Severe acute respiratory syndrome coronavirus 2
KYFKNHTSPD

SEQ ID NO: 8463 - protein, 10 aa, Severe acute respiratory syndrome coronavirus 2
HTSPDVDLGD

SEQ ID NO: 8464 - protein, 10 aa, Severe acute respiratory syndrome coronavirus 2
DVDLGDISGI

SEQ ID NO: 8465 - protein, 9 aa, Severe acute respiratory syndrome coronavirus 2
VDLGDISGI

SEQ ID NO: 8466 - protein, 9 aa, Severe acute respiratory syndrome coronavirus 2
ISGINASVV

SEQ ID NO: 8467 - protein, 9 aa, Severe acute respiratory syndrome coronavirus 2
GINASVVNI

SEQ ID NO: 8468 - protein, 10 aa, Severe acute respiratory syndrome coronavirus 2
INASVVNIQK

SEQ ID NO: 8469 - protein, 9 aa, Severe acute respiratory syndrome coronavirus 2
KEIDRLNEV

SEQ ID NO: 8470 - protein, 10 aa, Severe acute respiratory syndrome coronavirus 2
KEIDRLNEVA

SEQ ID NO: 8471 - protein, 9 aa, Severe acute respiratory syndrome coronavirus 2
RLNEVAKNL

SEQ ID NO: 8472 - protein, 9 aa, Severe acute respiratory syndrome coronavirus 2
NEVAKNLNE

SEQ ID NO: 8473 - protein, 10 aa, Severe acute respiratory syndrome coronavirus 2
VAKNLNESLI

SEQ ID NO: 8474 - protein, 9 aa, Severe acute respiratory syndrome coronavirus 2
NLNESLIDL

SEQ ID NO: 8475 - protein, 9 aa, Severe acute respiratory syndrome coronavirus 2
NESLIDLQE

SEQ ID NO: 8476 - protein, 10 aa, Severe acute respiratory syndrome coronavirus 2
NESLIDLQEL

SEQ ID NO: 8477 - protein, 10 aa, Severe acute respiratory syndrome coronavirus 2
SLIDLQELGK

SEQ ID NO: 8478 - protein, 10 aa, Severe acute respiratory syndrome coronavirus 2
LIDLQELGKY

SEQ ID NO: 8479 - protein, 10 aa, Severe acute respiratory syndrome coronavirus 2
LQELGKYEQY

SEQ ID NO: 8480 - protein, 9 aa, Severe acute respiratory syndrome coronavirus 2
QELGKYEQY

SEQ ID NO: 8481 - protein, 10 aa, Severe acute respiratory syndrome coronavirus 2
QELGKYEQYI

SEQ ID NO: 8482 - protein, 10 aa, Severe acute respiratory syndrome coronavirus 2
KYEQYIKWPW

SEQ ID NO: 8483 - protein, 9 aa, Severe acute respiratory syndrome coronavirus 2
YEQYIKWPW

SEQ ID NO: 8484 - protein, 10 aa, Severe acute respiratory syndrome coronavirus 2
YEQYIKWPWY

SEQ ID NO: 8485 - protein, 9 aa, Severe acute respiratory syndrome coronavirus 2
EQYIKWPWY

SEQ ID NO: 8486 - protein, 10 aa, Severe acute respiratory syndrome coronavirus 2
EQYIKWPWYI

SEQ ID NO: 8487 - protein, 9 aa, Severe acute respiratory syndrome coronavirus 2
QYIKWPWYI

SEQ ID NO: 8488 - protein, 10 aa, Severe acute respiratory syndrome coronavirus 2
QYIKWPWYIW

SEQ ID NO: 8489 - protein, 9 aa, Severe acute respiratory syndrome coronavirus 2
YIKWPWYIW

SEQ ID NO: 8490 - protein, 10 aa, Severe acute respiratory syndrome coronavirus 2
YIKWPWYIWL

SEQ ID NO: 8491 - protein, 9 aa, Severe acute respiratory syndrome coronavirus 2
IKWPWYIWL

SEQ ID NO: 8492 - protein, 9 aa, Severe acute respiratory syndrome coronavirus 2
KWPWYIWLG

SEQ ID NO: 8493 - protein, 10 aa, Severe acute respiratory syndrome coronavirus 2
KWPWYIWLGF

SEQ ID NO: 8494 - protein, 9 aa, Severe acute respiratory syndrome coronavirus 2
WPWYIWLGF

SEQ ID NO: 8495 - protein, 10 aa, Severe acute respiratory syndrome coronavirus 2
WPWYIWLGFI

SEQ ID NO: 8496 - protein, 9 aa, Severe acute respiratory syndrome coronavirus 2
PWYIWLGFI

SEQ ID NO: 8497 - protein, 10 aa, Severe acute respiratory syndrome coronavirus 2
PWYIWLGFIA

SEQ ID NO: 8498 - protein, 9 aa, Severe acute respiratory syndrome coronavirus 2
WYIWLGFIA

SEQ ID NO: 8499 - protein, 9 aa, Severe acute respiratory syndrome coronavirus 2
YIWLGFIAG

SEQ ID NO: 8500 - protein, 10 aa, Severe acute respiratory syndrome coronavirus 2
YIWLGFIAGL

SEQ ID NO: 8501 - protein, 9 aa, Severe acute respiratory syndrome coronavirus 2
IWLGFIAGL

SEQ ID NO: 8502 - protein, 10 aa, Severe acute respiratory syndrome coronavirus 2
IWLGFIAGLI

SEQ ID NO: 8503 - protein, 9 aa, Severe acute respiratory syndrome coronavirus 2
WLGFIAGLI

SEQ ID NO: 8504 - protein, 10 aa, Severe acute respiratory syndrome coronavirus 2
WLGFIAGLIA

SEQ ID NO: 8505 - protein, 9 aa, Severe acute respiratory syndrome coronavirus 2
FIAGLIAIV

SEQ ID NO: 8506 - protein, 10 aa, Severe acute respiratory syndrome coronavirus 2
FIAGLIAIVM

SEQ ID NO: 8507 - protein, 9 aa, Severe acute respiratory syndrome coronavirus 2
IAGLIAIVM

SEQ ID NO: 8508 - protein, 9 aa, Severe acute respiratory syndrome coronavirus 2
GLIAIVMVT

SEQ ID NO: 8509 - protein, 10 aa, Severe acute respiratory syndrome coronavirus 2
GLIAIVMVTI

SEQ ID NO: 8510 - protein, 10 aa, Severe acute respiratory syndrome coronavirus 2
LIAIVMVTIM

SEQ ID NO: 8511 - protein, 9 aa, Severe acute respiratory syndrome coronavirus 2
IAIVMVTIM

SEQ ID NO: 8512 - protein, 9 aa, Severe acute respiratory syndrome coronavirus 2
AIVMVTIML

SEQ ID NO: 8513 - protein, 9 aa, Severe acute respiratory syndrome coronavirus 2
IVMVTIMLC

SEQ ID NO: 8514 - protein, 10 aa, Severe acute respiratory syndrome coronavirus 2
IVMVTIMLCC

SEQ ID NO: 8515 - protein, 9 aa, Severe acute respiratory syndrome coronavirus 2
VMVTIMLCC

SEQ ID NO: 8516 - protein, 10 aa, Severe acute respiratory syndrome coronavirus 2
VMVTIMLCCM

SEQ ID NO: 8517 - protein, 9 aa, Severe acute respiratory syndrome coronavirus 2
MVTIMLCCM

SEQ ID NO: 8518 - protein, 10 aa, Severe acute respiratory syndrome coronavirus 2
MVTIMLCCMT

SEQ ID NO: 8519 - protein, 10 aa, Severe acute respiratory syndrome coronavirus 2
TIMLCCMTSC

SEQ ID NO: 8520 - protein, 9 aa, Severe acute respiratory syndrome coronavirus 2
IMLCCMTSC

SEQ ID NO: 8521 - protein, 10 aa, Severe acute respiratory syndrome coronavirus 2
IMLCCMTSCC

SEQ ID NO: 8522 - protein, 9 aa, Severe acute respiratory syndrome coronavirus 2
MLCCMTSCC

SEQ ID NO: 8523 - protein, 10 aa, Severe acute respiratory syndrome coronavirus 2
MLCCMTSCCS

SEQ ID NO: 8524 - protein, 10 aa, Severe acute respiratory syndrome coronavirus 2
CCMTSCCSCL

SEQ ID NO: 8525 - protein, 9 aa, Severe acute respiratory syndrome coronavirus 2
CMTSCCSCL

SEQ ID NO: 8526 - protein, 10 aa, Severe acute respiratory syndrome coronavirus 2
CMTSCCSCLK

SEQ ID NO: 8527 - protein, 9 aa, Severe acute respiratory syndrome coronavirus 2
MTSCCSCLK

SEQ ID NO: 8528 - protein, 10 aa, Severe acute respiratory syndrome coronavirus 2
MTSCCSCLKG

SEQ ID NO: 8529 - protein, 9 aa, Severe acute respiratory syndrome coronavirus 2
CSCLKGCCS

SEQ ID NO: 8530 - protein, 10 aa, Severe acute respiratory syndrome coronavirus 2
CLKGCCSCGS

SEQ ID NO: 8531 - protein, 10 aa, Severe acute respiratory syndrome coronavirus 2
GCCSCGSCCK

SEQ ID NO: 8532 - protein, 9 aa, Severe acute respiratory syndrome coronavirus 2
CCSCGSCCK

SEQ ID NO: 8533 - protein, 9 aa, Severe acute respiratory syndrome coronavirus 2
CSCGSCCKF

SEQ ID NO: 8534 - protein, 10 aa, Severe acute respiratory syndrome coronavirus 2
DEDDSEPVLK

SEQ ID NO: 8535 - protein, 9 aa, Severe acute respiratory syndrome coronavirus 2
DSEPVLKGV

SEQ ID NO: 8536 - protein, 10 aa, Severe acute respiratory syndrome coronavirus 2
DSEPVLKGVK

SEQ ID NO: 8537 - protein, 10 aa, Severe acute respiratory syndrome coronavirus 2
SEPVLKGVKL

SEQ ID NO: 8538 - protein, 9 aa, Severe acute respiratory syndrome coronavirus 2
EPVLKGVKL

SEQ ID NO: 8539 - protein, 10 aa, Severe acute respiratory syndrome coronavirus 2
PVLKGVKLHY

SEQ ID NO: 8540 - protein, 9 aa, Severe acute respiratory syndrome coronavirus 2
VLKGVKLHY

SEQ ID NO: 8541 - protein, 9 aa, Severe acute respiratory syndrome coronavirus 2
DTDFVNEFY

SEQ ID NO: 8542 - protein, 9 aa, Severe acute respiratory syndrome coronavirus 2
PTDNYITTY

SEQ ID NO: 8543 - protein, 9 aa, Severe acute respiratory syndrome coronavirus 2
LTDEMIAQY

SEQ ID NO: 8544 - protein, 9 aa, Severe acute respiratory syndrome coronavirus 2
ISDYDYYRY

SEQ ID NO: 8545 - protein, 9 aa, Severe acute respiratory syndrome coronavirus 2
MSNLGMPSY

SEQ ID NO: 8546 - protein, 9 aa, Severe acute respiratory syndrome coronavirus 2
NQDLNGNWY

SEQ ID NO: 8547 - protein, 9 aa, Severe acute respiratory syndrome coronavirus 2
LVAEWFLAY

SEQ ID NO: 8548 - protein, 9 aa, Severe acute respiratory syndrome coronavirus 2
KVSIWNLDY

SEQ ID NO: 8549 - protein, 9 aa, Severe acute respiratory syndrome coronavirus 2
FIDTKRGVY

SEQ ID NO: 8550 - protein, 9 aa, Severe acute respiratory syndrome coronavirus 2
LTGHMLDMY

SEQ ID NO: 8551 - protein, 9 aa, Severe acute respiratory syndrome coronavirus 2
YTEISFMLW

SEQ ID NO: 8552 - protein, 9 aa, Severe acute respiratory syndrome coronavirus 2
YTERSEKSY

SEQ ID NO: 8553 - protein, 9 aa, Severe acute respiratory syndrome coronavirus 2
WMESEFRVY

SEQ ID NO: 8554 - protein, 9 aa, Severe acute respiratory syndrome coronavirus 2
HSIGFDYVY

SEQ ID NO: 8555 - protein, 9 aa, Severe acute respiratory syndrome coronavirus 2
NIDGYFKIY

SEQ ID NO: 8556 - protein, 9 aa, Severe acute respiratory syndrome coronavirus 2
LSPRWYFYY

SEQ ID NO: 8557 - protein, 9 aa, Severe acute respiratory syndrome coronavirus 2
HSDKFTDGV

SEQ ID NO: 8558 - protein, 9 aa, Severe acute respiratory syndrome coronavirus 2
LSDLQDLKW

SEQ ID NO: 8559 - protein, 9 aa, Severe acute respiratory syndrome coronavirus 2
LTKHPNQEY

SEQ ID NO: 8560 - protein, 9 aa, Severe acute respiratory syndrome coronavirus 2
VVDYGARFY

SEQ ID NO: 8561 - protein, 9 aa, Severe acute respiratory syndrome coronavirus 2
TVAYFNMVY

SEQ ID NO: 8562 - protein, 9 aa, Severe acute respiratory syndrome coronavirus 2
VSIINNTVY

SEQ ID NO: 8563 - protein, 9 aa, Severe acute respiratory syndrome coronavirus 2
KIEELFYSY

SEQ ID NO: 8564 - protein, 9 aa, Severe acute respiratory syndrome coronavirus 2
EIDPKLDNY

SEQ ID NO: 8565 - protein, 9 aa, Severe acute respiratory syndrome coronavirus 2
SSGDATTAY

SEQ ID NO: 8566 - protein, 9 aa, Severe acute respiratory syndrome coronavirus 2
YLYALVYFL

SEQ ID NO: 8567 - protein, 9 aa, Severe acute respiratory syndrome coronavirus 2
ILFTRFFYV

SEQ ID NO: 8568 - protein, 9 aa, Severe acute respiratory syndrome coronavirus 2
GLMWLSYFI

SEQ ID NO: 8569 - protein, 9 aa, Severe acute respiratory syndrome coronavirus 2
WLMWLIINL

SEQ ID NO: 8570 - protein, 9 aa, Severe acute respiratory syndrome coronavirus 2
LMWLIINLV

SEQ ID NO: 8571 - protein, 9 aa, Severe acute respiratory syndrome coronavirus 2
FLAHIQWMV

SEQ ID NO: 8572 - protein, 9 aa, Severe acute respiratory syndrome coronavirus 2
KLSYGIATV

SEQ ID NO: 8573 - protein, 9 aa, Severe acute respiratory syndrome coronavirus 2
YLDAYNMMI

SEQ ID NO: 8574 - protein, 9 aa, Severe acute respiratory syndrome coronavirus 2
FLNRFTTTL

SEQ ID NO: 8575 - protein, 9 aa, Severe acute respiratory syndrome coronavirus 2
ALSKGVHFV

SEQ ID NO: 8576 - protein, 9 aa, Severe acute respiratory syndrome coronavirus 2
VLWAHGFEL

SEQ ID NO: 8577 - protein, 9 aa, Severe acute respiratory syndrome coronavirus 2
LLLTILTSL

SEQ ID NO: 8578 - protein, 9 aa, Severe acute respiratory syndrome coronavirus 2
YLTNDVSFL

SEQ ID NO: 8579 - protein, 9 aa, Severe acute respiratory syndrome coronavirus 2
FVNEFYAYL

SEQ ID NO: 8580 - protein, 9 aa, Severe acute respiratory syndrome coronavirus 2
KLIEYTDFA

SEQ ID NO: 8581 - protein, 9 aa, Severe acute respiratory syndrome coronavirus 2
AIFYLITPV

SEQ ID NO: 8582 - protein, 9 aa, Severe acute respiratory syndrome coronavirus 2
FLPRVFSAV

SEQ ID NO: 8583 - protein, 9 aa, Severe acute respiratory syndrome coronavirus 2
KIADYNYKL

SEQ ID NO: 8584 - protein, 9 aa, Severe acute respiratory syndrome coronavirus 2
NLIDSYFVV

SEQ ID NO: 8585 - protein, 9 aa, Severe acute respiratory syndrome coronavirus 2
ALWEIQQVV

SEQ ID NO: 8586 - protein, 9 aa, Severe acute respiratory syndrome coronavirus 2
NLSDRVVFV

SEQ ID NO: 8587 - protein, 9 aa, Severe acute respiratory syndrome coronavirus 2
SMWSFNPET

SEQ ID NO: 8588 - protein, 9 aa, Severe acute respiratory syndrome coronavirus 2
SLVKPSFYV

SEQ ID NO: 8589 - protein, 9 aa, Severe acute respiratory syndrome coronavirus 2
YVWKSYVHV

SEQ ID NO: 8590 - protein, 9 aa, Severe acute respiratory syndrome coronavirus 2
KLLEQWNLV

SEQ ID NO: 8591 - protein, 9 aa, Severe acute respiratory syndrome coronavirus 2
STFNVPMEK

SEQ ID NO: 8592 - protein, 9 aa, Severe acute respiratory syndrome coronavirus 2
RLISMMGFK

SEQ ID NO: 8593 - protein, 9 aa, Severe acute respiratory syndrome coronavirus 2
TMLFTMLRK

SEQ ID NO: 8594 - protein, 9 aa, Severe acute respiratory syndrome coronavirus 2
KTFPPTEPK

SEQ ID NO: 8595 - protein, 9 aa, Severe acute respiratory syndrome coronavirus 2
AVAKHDFFK

SEQ ID NO: 8596 - protein, 9 aa, Severe acute respiratory syndrome coronavirus 2
KSAGFPFNK

SEQ ID NO: 8597 - protein, 9 aa, Severe acute respiratory syndrome coronavirus 2
VLHDIGNPK

SEQ ID NO: 8598 - protein, 9 aa, Severe acute respiratory syndrome coronavirus 2
VLSGHNLAK

SEQ ID NO: 8599 - protein, 9 aa, Severe acute respiratory syndrome coronavirus 2
GVYYHKNNK

SEQ ID NO: 8600 - protein, 9 aa, Severe acute respiratory syndrome coronavirus 2
TTIKPVTYK

SEQ ID NO: 8601 - protein, 9 aa, Severe acute respiratory syndrome coronavirus 2
HLYLQYIRK

SEQ ID NO: 8602 - protein, 9 aa, Severe acute respiratory syndrome coronavirus 2
RQFHQKLLK

SEQ ID NO: 8603 - protein, 9 aa, Severe acute respiratory syndrome coronavirus 2
MSALNHTKK

SEQ ID NO: 8604 - protein, 9 aa, Severe acute respiratory syndrome coronavirus 2
GVAMPNLYK

SEQ ID NO: 8605 - protein, 9 aa, Severe acute respiratory syndrome coronavirus 2
HLMGWDYPK

SEQ ID NO: 8606 - protein, 9 aa, Severe acute respiratory syndrome coronavirus 2
LLNKEMYLK

SEQ ID NO: 8607 - protein, 9 aa, Severe acute respiratory syndrome coronavirus 2
KSAAEASKK

SEQ ID NO: 8608 - protein, 9 aa, Severe acute respiratory syndrome coronavirus 2
KHYTPSFKK

SEQ ID NO: 8609 - protein, 9 aa, Severe acute respiratory syndrome coronavirus 2
VTYVPAQEK

SEQ ID NO: 8610 - protein, 9 aa, Severe acute respiratory syndrome coronavirus 2
IQITISSFK

SEQ ID NO: 8611 - protein, 9 aa, Severe acute respiratory syndrome coronavirus 2
ALRANSAVK

SEQ ID NO: 8612 - protein, 9 aa, Severe acute respiratory syndrome coronavirus 2
QTFFKLVNK

SEQ ID NO: 8613 - protein, 9 aa, Severe acute respiratory syndrome coronavirus 2
TLADAGFIK

SEQ ID NO: 8614 - protein, 9 aa, Severe acute respiratory syndrome coronavirus 2
TVKPGNFNK

SEQ ID NO: 8615 - protein, 9 aa, Severe acute respiratory syndrome coronavirus 2
SAFAMMFVK

SEQ ID NO: 8616 - protein, 9 aa, Severe acute respiratory syndrome coronavirus 2
NYMPYFFTL

SEQ ID NO: 8617 - protein, 9 aa, Severe acute respiratory syndrome coronavirus 2
QYIKWPWYI

SEQ ID NO: 8618 - protein, 9 aa, Severe acute respiratory syndrome coronavirus 2
YYTSNPTTF

SEQ ID NO: 8619 - protein, 9 aa, Severe acute respiratory syndrome coronavirus 2
TYASALWEI

SEQ ID NO: 8620 - protein, 9 aa, Severe acute respiratory syndrome coronavirus 2
NYNYLYRLF

SEQ ID NO: 8621 - protein, 9 aa, Severe acute respiratory syndrome coronavirus 2
VYMPASWVM

SEQ ID NO: 8622 - protein, 9 aa, Severe acute respiratory syndrome coronavirus 2
AYANSVFNI

SEQ ID NO: 8623 - protein, 9 aa, Severe acute respiratory syndrome coronavirus 2
RYMNSQGLL

SEQ ID NO: 8624 - protein, 9 aa, Severe acute respiratory syndrome coronavirus 2
FYGGWHNML

SEQ ID NO: 8625 - protein, 9 aa, Severe acute respiratory syndrome coronavirus 2
LYLYALVYF

SEQ ID NO: 8626 - protein, 9 aa, Severe acute respiratory syndrome coronavirus 2
IYNDKVAGF

SEQ ID NO: 8627 - protein, 9 aa, Severe acute respiratory syndrome coronavirus 2
DYLVSTQEF

SEQ ID NO: 8628 - protein, 9 aa, Severe acute respiratory syndrome coronavirus 2
KYLYFIKGL

SEQ ID NO: 8629 - protein, 9 aa, Severe acute respiratory syndrome coronavirus 2
YYHTTDPSF

SEQ ID NO: 8630 - protein, 9 aa, Severe acute respiratory syndrome coronavirus 2
FFASFYYVW

SEQ ID NO: 8631 - protein, 9 aa, Severe acute respiratory syndrome coronavirus 2
SYATHSDKF

SEQ ID NO: 8632 - protein, 9 aa, Severe acute respiratory syndrome coronavirus 2
MFTPLVPFW

SEQ ID NO: 8633 - protein, 9 aa, Severe acute respiratory syndrome coronavirus 2
YYKKDNSYF

SEQ ID NO: 8634 - protein, 9 aa, Severe acute respiratory syndrome coronavirus 2
FYLTNDVSF

SEQ ID NO: 8635 - protein, 9 aa, Severe acute respiratory syndrome coronavirus 2
YYQLYSTQL

SEQ ID NO: 8636 - protein, 9 aa, Severe acute respiratory syndrome coronavirus 2
AYLRKHFSM

SEQ ID NO: 8637 - protein, 9 aa, Severe acute respiratory syndrome coronavirus 2
RYKLEGYAF

SEQ ID NO: 8638 - protein, 9 aa, Severe acute respiratory syndrome coronavirus 2
STQWSLFFF

SEQ ID NO: 8639 - protein, 9 aa, Severe acute respiratory syndrome coronavirus 2
DYQGKPLEF

SEQ ID NO: 8640 - protein, 9 aa, Severe acute respiratory syndrome coronavirus 2
LYLDAYNMM

SEQ ID NO: 8641 - protein, 9 aa, Severe acute respiratory syndrome coronavirus 2
NPAWRKAVF

SEQ ID NO: 8642 - protein, 9 aa, Severe acute respiratory syndrome coronavirus 2
SPRWYFYYL

SEQ ID NO: 8643 - protein, 9 aa, Severe acute respiratory syndrome coronavirus 2
FPPTSFGPL

SEQ ID NO: 8644 - protein, 9 aa, Severe acute respiratory syndrome coronavirus 2
TPAFDKSAF

SEQ ID NO: 8645 - protein, 9 aa, Severe acute respiratory syndrome coronavirus 2
VPHISRQRL

SEQ ID NO: 8646 - protein, 9 aa, Severe acute respiratory syndrome coronavirus 2
SPYNSQNAV

SEQ ID NO: 8647 - protein, 9 aa, Severe acute respiratory syndrome coronavirus 2
MPASWVMRI

SEQ ID NO: 8648 - protein, 9 aa, Severe acute respiratory syndrome coronavirus 2
MPNMLRIMA

SEQ ID NO: 8649 - protein, 9 aa, Severe acute respiratory syndrome coronavirus 2
APISAMVRM

SEQ ID NO: 8650 - protein, 9 aa, Severe acute respiratory syndrome coronavirus 2
KPANNSLKI

SEQ ID NO: 8651 - protein, 9 aa, Severe acute respiratory syndrome coronavirus 2
RPPLNRNYV

SEQ ID NO: 8652 - protein, 9 aa, Severe acute respiratory syndrome coronavirus 2
TPINLVRDL

SEQ ID NO: 8653 - protein, 9 aa, Severe acute respiratory syndrome coronavirus 2
HPTQAPTHL

SEQ ID NO: 8654 - protein, 9 aa, Severe acute respiratory syndrome coronavirus 2
IPTNFTISV

SEQ ID NO: 8655 - protein, 9 aa, Severe acute respiratory syndrome coronavirus 2
LPNNTASWF

SEQ ID NO: 8656 - protein, 9 aa, Severe acute respiratory syndrome coronavirus 2
FPLKLRGTA

SEQ ID NO: 8657 - protein, 9 aa, Severe acute respiratory syndrome coronavirus 2
IPLTTAAKL

SEQ ID NO: 8658 - protein, 9 aa, Severe acute respiratory syndrome coronavirus 2
KPYIKWDLL

SEQ ID NO: 8659 - protein, 9 aa, Severe acute respiratory syndrome coronavirus 2
ILRKGGRTI

SEQ ID NO: 8660 - protein, 9 aa, Severe acute respiratory syndrome coronavirus 2
IPTITQMNL

SEQ ID NO: 8661 - protein, 9 aa, Severe acute respiratory syndrome coronavirus 2
MPLKAPKEI

SEQ ID NO: 8662 - protein, 9 aa, Severe acute respiratory syndrome coronavirus 2
RARSVSPKL

SEQ ID NO: 8663 - protein, 9 aa, Severe acute respiratory syndrome coronavirus 2
LPQNAVVKI

SEQ ID NO: 8664 - protein, 9 aa, Severe acute respiratory syndrome coronavirus 2
AARVVRSIF

SEQ ID NO: 8665 - protein, 9 aa, Severe acute respiratory syndrome coronavirus 2
LPNDDTLRV

SEQ ID NO: 8666 - protein, 9 aa, Severe acute respiratory syndrome coronavirus 2
KENSYTTTI

SEQ ID NO: 8667 - protein, 9 aa, Severe acute respiratory syndrome coronavirus 2
QEILGTVSW

SEQ ID NO: 8668 - protein, 9 aa, Severe acute respiratory syndrome coronavirus 2
AEWFLAYIL

SEQ ID NO: 8669 - protein, 9 aa, Severe acute respiratory syndrome coronavirus 2
MDNSPNLAW

SEQ ID NO: 8670 - protein, 9 aa, Severe acute respiratory syndrome coronavirus 2
AEVQIDRLI

SEQ ID NO: 8671 - protein, 9 aa, Severe acute respiratory syndrome coronavirus 2
EEVVENPTI

SEQ ID NO: 8672 - protein, 9 aa, Severe acute respiratory syndrome coronavirus 2
FELTSMKYF

SEQ ID NO: 8673 - protein, 9 aa, Severe acute respiratory syndrome coronavirus 2
KENDSKEGF

SEQ ID NO: 8674 - protein, 9 aa, Severe acute respiratory syndrome coronavirus 2
QEYADVFHL

SEQ ID NO: 8675 - protein, 9 aa, Severe acute respiratory syndrome coronavirus 2
QELGKYEQY

SEQ ID NO: 8676 - protein, 9 aa, Severe acute respiratory syndrome coronavirus 2
SEYDYVIFT

SEQ ID NO: 8677 - protein, 9 aa, Severe acute respiratory syndrome coronavirus 2
SEIIGYKAI

SEQ ID NO: 8678 - protein, 9 aa, Severe acute respiratory syndrome coronavirus 2
REQIDGYVM

SEQ ID NO: 8679 - protein, 9 aa, Severe acute respiratory syndrome coronavirus 2
KEGQINDMI

SEQ ID NO: 8680 - protein, 9 aa, Severe acute respiratory syndrome coronavirus 2
MEIDFLELA

SEQ ID NO: 8681 - protein, 9 aa, Severe acute respiratory syndrome coronavirus 2
EEVGHTDLM

SEQ ID NO: 8682 - protein, 9 aa, Severe acute respiratory syndrome coronavirus 2
EEMLDNRAT

SEQ ID NO: 8683 - protein, 9 aa, Severe acute respiratory syndrome coronavirus 2
SEHDYQIGG

SEQ ID NO: 8684 - protein, 9 aa, Severe acute respiratory syndrome coronavirus 2
REHEHEIAW

SEQ ID NO: 8685 - protein, 9 aa, Severe acute respiratory syndrome coronavirus 2
HEHEIAWYT

SEQ ID NO: 8686 - protein, 9 aa, Severe acute respiratory syndrome coronavirus 2
FEYVSQPFL

SEQ ID NO: 8687 - protein, 9 aa, Severe acute respiratory syndrome coronavirus 2
AEILLIIMR

SEQ ID NO: 8688 - protein, 9 aa, Severe acute respiratory syndrome coronavirus 2
QELYSPIFL

SEQ ID NO: 8689 - protein, 9 aa, Severe acute respiratory syndrome coronavirus 2
SEAVEAPLV

SEQ ID NO: 8690 - protein, 9 aa, Severe acute respiratory syndrome coronavirus 2
GEVFNATRF

SEQ ID NO: 8691 - protein, 9 aa, Severe Acute Respiratory Syndrome coronavirus 2 (SARS-CoV-2)
TDHSSSSDN

SEQ ID NO: 8692 - protein, 9 aa, Severe Acute Respiratory Syndrome coronavirus 2 (SARS-CoV-2)
DHSSSSDNI

1-97. (canceled)

98. A composition comprising:
a polypeptide comprising an amino acid sequence selected from the group consisting of SEQ ID NOS: 4-1676, 1713-2595, 2605-2638, 2647-2718, and 2735-8692, and/or fragments and variants thereof;
a polypeptide comprising an amino acid sequence selected from the group consisting of SEQ ID NOS: 4-1676, 1713-2595, 2605-2638, 2647-2718, and 2735-8692 further comprising 1 to 12 additional amino acids distributed in any ratio on the N terminus and/or C-terminus of the;
a nucleic acid encoding said polypeptide;
a plasmid encoding said polypeptide;
a vector encoding said polypeptide; or
a pharmaceutical composition comprising said polypeptide, said nucleic acid, said plamid, or said vector, said pharmaceutical composition further comprising a pharmaceutically-acceptable carrier and/or excipient.

99. The composition according to claim 98, wherein said variant or fragment of an amino acid sequence selected from the group consisting of SEQ ID NOS: 4-1676, 1713-2595, 2605-2638, 2647-2718, and 2735-8692 retains MHC binding propensity and TCR specificity, and/or retains anti-SARS-CoV-2 activity.

100. The composition of claim 98 comprising an amino acid sequence having at least 75%, 80%, 85%, 90%, or 95% homology to any one of SEQ ID NOS: 4-1676, 1713-2595, 2605-2638, 2647-2718, and 2735-8692, and fragments thereof, wherein said polypeptide retains MHC binding propensity and the same TCR specificity, and/or retains anti-SARS-CoV-2 activity.

101. The composition of claim 98, wherein said nucleic acid encoding said polypeptide comprises a sequence selected from the group consisting of SEQ ID NOS: 1677-1692, 2593-2604, 2639-2646, and 2719-2734 and fragments or variants thereof.

102. The composition of claim 98, wherein said polypeptide is a chimeric or fusion polypeptide, wherein said polypeptide is joined, linked, or inserted into a heterologous polypeptide.

103. A vaccine comprising the polypeptide, the nucleic acid, the plasmid or the vector according to claim 98 and a pharmaceutically-acceptable excipient, carrier, and/or adjuvant.

104. A method for inducing immunity against a coronavirus infection, optionally a SARS-CoV-2 infection, Severe Acute Respiratory Syndrome (SARS-CoV) or Middle East respiratory syndrome coronavirus (MERS-CoV)) and/or diseases caused by said coronavirus in a subject in need thereof, the method comprising administering to the subject a therapeutically effective amount of the composition according to claim 98, or
a vaccine comprising the polypeptide, the nucleic acid, the plasmid or the vector according to claim 98 and a pharmaceutically-acceptable excipient, carrier, and/or adjuvant.

105. The method according to claim 104, wherein the step of administration additionally includes administration of an SARS-CoV-2 virus, wherein the virus is a live attenuated virus or inactivated virus.

106. The method according to claim 104, the method comprising administering to the subject a therapeutically effective amount of one or more of the polypeptides or the nucleic acids.

107. The method according to claim 106, wherein the step of administration additionally includes administration of a SARS-CoV-2 virus, wherein the virus is a live attenuated virus or inactivated virus.

108. A method for measuring a CMI response against a coronavirus in a subject, said method comprising; collecting a whole blood sample from said subject wherein said whole blood sample comprises cells of the immune system which are capable of producing immune effector molecules following stimulation by an antigen, incubating a mixture comprising the whole blood sample, at least one polypeptide according to claim 98, or the polypeptide of claim 98 with an amount of an isolated simple sugar effective to enhance the stimulation by the antigen and/or heparin, and measuring the presence of, or elevation in, a level of an immune effector molecule wherein a presence or level of said immune effector molecule is indicative of the capacity of said subject to mount a cell-mediated immune response.

109. The method of claim 108 wherein the subject is a human.

110. The method of claim 108 wherein the whole blood is collected in a tube comprising at least one of said polypeptide.

111. The method of claim 108 wherein the whole blood is collected in a tube comprising heparin.

112. The method of claim 108 wherein the whole blood sample is incubated with the at least one of said polypeptide for from 5 to 50 hours.

113. The method of claim 108 wherein the immune effector molecule is a cytokine.

114. The method of claim 113 wherein the cytokine is IFN-γ, GM-CSF, an interleukin or a TNF-α.

115. The method of claim 108, wherein the subject is infected by a coronavirus.

116. The method of claim 108, wherein the immune cells are NK cells, T-cells, B-cells, dendritic cells, macrophages, or monocytes.

117. An assay for identifying SARS-CoV-2 or a related coronavirus-specific immediate effector T cells in a subject, comprising: (a) providing a sample from said subject containing T cells; (b) exposing said T cells to an immunogenic amount of at least one polypeptide according to claim 98; and (c) prior to the generation of new immediate effector T cells in the sample, determining whether said T cells are activated by said polypeptide by measuring secretion of a cytokine from said T cells; wherein activation of said T cells identifies the presence of SARS-CoV-2 or a related coronavirus -specific immediate effector T cells that were present in the original sample, in said subject.

118. An assay for identifying coronavirus-specific immediate effector T cells in a subject, comprising: (a) providing a sample from said subject containing T cells; (b) exposing said T cells to an immunogenic amount of at least one polypeptide according to claim 98; (c) incubating said T cells for a period of time which is not sufficient to effect differentiation of quiescent T cells to immediate effector T cells; and (d) determining whether said T cells are activated by said polypeptide by measuring secretion of a cytokine from said T cells, wherein activation of said T cells identifies the presence of SARS-CoV-2 or a related coronavirus-specific immediate effector T cells in said subject.

119. A method of diagnosing infection in a human host by, or exposure of a human host to, a SARS-CoV-2 or a related coronavirus, which method comprises the steps of: (i) contacting a population of T cells from the host with one or more polypeptides according to claim 98; and (ii) determining in vitro whether the T cells of said T cell population show a recognition response to said polypeptide.

120. A method of preventing, treating, or ameliorating a disease by SARS-CoV-2 infection in a subject in need thereof, the method comprising administering to the subject a therapeutically effective amount of one or more of a composition according to claim 98.
